(19) United States
(12) Patent Application Publication
(10) Pub. No.: US 2020/0405824 A1
(43) Pub. Date: Dec. 31, 2020

(54) USE OF RIBONUCLEOTIDE REDUCTASE ALONE OR IN COMBINATION WITH MICRO-DYSTROPHIN TO TREAT DUCHENNE MUSCULAR DYSTROPHY STRIATED MUSCLE DISEASE

(71) Applicant: UNIVERSITY OF WASHINGTON, Seattle, WA (US)

(72) Inventors: Guy L. ODOM, Seattle, WA (US); Michael REGNIER, Seattle, WA (US); Jeffrey S. CHAMBERLAIN, Seattle, WA (US); Stephen D. HAUSCHKA, Seattle, WA (US)

(73) Assignee: UNIVERSITY OF WASHINGTON, Seattle, WA (US)

(21) Appl. No.: 16/913,735

(22) Filed: Jun. 26, 2020

Related U.S. Application Data
(60) Provisional application No. 62/866,986, filed on Jun. 26, 2019.

(51) Int. Cl. A61K 38/44; A61K 38/17; A61K 47/69

(52) U.S. Cl. CPC A61K 38/446; A61K 47/6901; A61K 38/177

(57) ABSTRACT

The present disclosure relates generally to methods of treating a subject having muscular dystrophy or DMD. The present disclosure also relates generally to methods of prophylactically treating a subject at risk of developing muscular dystrophy or DMD. In some embodiments, the methods may include administering a pharmaceutical composition including an RRM1 gene, an RRM2 gene, and a delivery vehicle to a subject. In another embodiment, the methods may include administering a pharmaceutical composition including an RRM1 gene and an RRM2 gene coupled to a regulatory cassette to a subject. In yet another embodiment, the methods may include administering a pharmaceutical composition including an RRM 1 gene, an RRM2 gene, a regulatory cassette, and a delivery vehicle to a subject.

### CROSS-REFERENCE TO RELATED APPLICATIONS

[0001] This application claims benefit under 35 U.S.C. § 119(e) of U.S. Provisional Application No. 62/866,986 filed Jun. 26, 2019, the contents of which are incorporated herein by reference in its entirety.

### GOVERNMENT SUPPORT

[0002] This invention was made with government support under Grant No. W81XWH-18-1-0624, awarded by the Department of Defense and Grant Nos. R01 HL122332 and R01 HL128368 and R56 AG055594, awarded by the National Institutes of Health. The government has certain rights in the invention.

### SEQUENCE LISTING

[0003] The instant application contains a Sequence Listing which has been submitted electronically in ASCII format and is hereby incorporated by reference in its entirety. Said ASCII copy, created on Jun. 26, 2020, is named 034186-095790USPT_SL.txt and is 3,439,088 bytes in size.

### TECHNICAL FIELD

[0004] The technology described herein relates to methods of treating muscular dystrophy and related pathology.

### BACKGROUND OF THE INVENTION

[0005] Duchenne muscular dystrophy (DMD) is caused by mutations in the gene encoding dystrophin, a protein that links the cytoplasmic contractile components of muscle cells to the extracellular matrix. The clinical manifestations of disease progression include severe peripheral muscle weakness, respiratory insufficiency, and cardiomyopathy that advances to heart failure in many patients.

[0006] A need exists to rescue muscle function in subjects with muscular dystrophy, such as DMD.

### SUMMARY OF THE INVENTION

[0007] The present disclosure relates to a cardiac function-enhancing gene therapy approach that targets myosin in contractile filaments by overexpressing the enzyme ribonucleotide reductase (RNR). RNR converts ADP to deoxy-ADP (dADP), which is rapidly converted to dATP in cells. In humans, RNRs may be encoded by the RRM1 and RRM2 genes. Duchenne muscular dystrophy (DMD) is caused by mutations in the gene encoding dystrophin, a protein that links the cytoplasmic contractile components of muscle cells to the extracellular matrix. When dystrophin is absent or aberrant, the compromised linkage function may cause membrane damage during muscle contraction, which may lead to progressive structural and functional deterioration in cardiomyocytes and skeletal muscle cells. The clinical manifestations of disease progression may include severe peripheral muscle weakness, respiratory insufficiency, and cardiomyopathy that may advance to heart failure in patients. Gene replacement approaches for DMD in animal models and patients can partially ameliorate muscle functional deficits, though given the progressive nature of the disease, it is unclear whether these approaches can adequately address the associated cardiomyopathy. In the present study, the relative cardiac responses in an advanced-age DMD cardiomyopathy mouse model following intravenously administered recombinant adeno-associated viral (rAAV) vectors carrying muscle-specific micro-dystrophin (μDys) or ribonucleotide reductase (RNR) were compared. The results in the working examples demonstrate that both μDys and RNR treatments of DMD hearts can rescue baseline cardiac dysfunction and high workload contractile performance in isolated heart preparations. Systolic function is significantly improved by striated muscle-specific expression of μDys, but only cardiac muscle-specific expression of RNR improved both systolic and diastolic function. It was unexpected that CK8, which is actually stronger in cardiac muscle cells than cTNT, did not work as well for driving RNR expression to improve diastole—that is strength of expression alone is not sufficient to provide the best improvement in diastole. Therefore, cardiac-specific RNR expression can provide a beneficial contractile augmentation therapy for muscular dystrophy. Combination of striated muscle-specific expression of μDys with cardiac muscle-specific expression of RNR can provide further therapeutic benefits.

[0008] In one aspect, described herein is a method of treating a subject having muscular dystrophy or DMD. In another aspect, described herein is a method of prophylactically treating a subject at risk of developing muscular dystrophy or DMD. In another aspect, described herein is a method of treating a subject diagnosed with muscular dystrophy or DMD that is at risk of developing cardiomyopathy.

[0009] In one embodiment of any of the aspects, the methods comprise administering a pharmaceutical composition including an RRM1 gene, an RRM2 gene, and a delivery vehicle to a subject. In another embodiment of any of the aspects, the methods comprise administering a pharmaceutical composition including an RRM1 gene and an RRM2 gene coupled to a regulatory cassette to a subject. In another embodiment of any of the aspects, the methods include administering a pharmaceutical composition including an RRM 1 gene, an RRM2 gene, a regulatory cassette, and a delivery vehicle to a subject.

[0010] In another embodiment of any of the aspects, the methods comprise administering a first pharmaceutical composition including an RRM1 gene in a first delivery vehicle and a second pharmaceutical composition including an RRM2 gene in a second delivery vehicle, such that the first delivery vehicle and the second delivery vehicle are not the same vehicle. In another embodiment of any of the aspects, the methods comprise administering a first pharmaceutical composition including an RRM1 gene coupled to a first regulatory cassette in a first delivery vehicle and a second pharmaceutical composition including an RRM2 gene coupled to a second regulatory cassette in a second delivery vehicle, such that the first delivery vehicle and the second delivery vehicle are not the same vehicle.

[0011] In another embodiment of any of the aspects, the methods comprise administering a pharmaceutical composition including (i) an RRM1 gene and/or an RRM2 gene, operably coupled to a first regulatory cassette; (ii) a micro-dystrophin gene encoding a protein, operably coupled to a second regulatory cassette; and (iii) one or more delivery vehicles. In some embodiments, the methods comprise administering a pharmaceutical composition including (i) an RRM 1 gene, operably coupled to a first regulatory cassette; (ii) an RRM2 gene, operably coupled to a second regulatory cassette; (iii) a micro-dystrophin gene encoding a protein, operably coupled to a third regulatory cassette; and (iv) one or more delivery vehicles.

[0012] In another embodiment of any of the aspects, the methods comprise administering (i) a first pharmaceutical composition including an RRM1 gene, an RRM2 gene, a first regulatory cassette, and a first delivery vehicle, and (ii) a second pharmaceutical composition including a micro-dystrophin gene, a second regulatory cassette, and a second delivery vehicle, such that the first delivery vehicle and the second delivery vehicle are separate delivery vehicles. In another embodiment of any of the aspects, the methods comprises administering (i) a first pharmaceutical composition including an RRM1 gene, a first regulatory cassette, and a first delivery vehicle, (ii) a second pharmaceutical composition including an RRM2 gene, a second regulatory cassette, and a second delivery vehicle; and (iii) a third pharmaceutical composition including a micro-dystrophin gene, a third regulatory cassette, and a third delivery vehicle, such that the first delivery vehicle, the second delivery vehicle, and the third delivery vehicles are separate delivery vehicles.

[0013] In another embodiment of any of the aspects, the regulatory cassettes are selected from the group consisting of: a cardiac troponin T (cTNT) regulatory cassette; a creatine kinase regulatory cassette; a muscle creatine kinase (MCK) regulatory cassette; a CK8 regulatory cassette; a MHCK7 regulatory cassette; CK7 regulatory cassette; and any fragment or combinations thereof.

[0014] In another embodiment of any of the aspects, the methods comprise administering (i) a first pharmaceutical composition including an RRM1 gene, an RRM2 gene, a cTnT regulatory cassette, and a first delivery vehicle, and (ii) a second pharmaceutical composition including a micro-dystrophin gene, a CK8 regulatory cassette, and a second delivery vehicle.

[0015] In another embodiment of any of the aspects, the methods comprise administering (i) a first pharmaceutical composition including an RRM1 gene, a cTnT regulatory cassette, and a first delivery vehicle, (ii) a second pharmaceutical composition including an RRM2 gene, a cTnT regulatory cassette, and a second delivery vehicle; and (iii) a third pharmaceutical composition including a micro-dystrophin gene, a CK8 regulatory cassette, and a third delivery vehicle.

[0016] DNA can be introduced into a subject's cells in several ways. There are transfection methods, including chemical methods such as calcium phosphate precipitation and liposome-mediated transfection, and physical methods such as electroporation. There are also methods that use recombinant viruses. Current viral-vector mediated gene delivery methods include, but are not limited to, retrovirus, lentivirus, adenovirus, herpes virus, pox virus, and adeno-associated virus (AAV) vectors.

[0017] In another embodiment of any of the aspects, the delivery vehicle includes an adeno-associated virus (AAV) vector or a recombinant adeno-associated virus vector (rAAV).

[0018] In another embodiment of any of the aspects, the pharmaceutical compositions is configured to reduce a pathological effect or symptom of a muscular dystrophy. In another embodiment of any of the aspects, the muscular dystrophy is selected from the group consisting of: myotonic muscular dystrophy, Duchenne muscular dystrophy, Becker muscular dystrophy, limb-girdle muscular dystrophy, facioscapulohumeral muscular dystrophy, congenital muscular dystrophy, oculopharyngeal muscular dystrophy, distal muscular dystrophy, Emery-Dreifuss muscular dystrophy, and/or another suitable muscular dystrophy.

[0019] In another aspect, described herein is a method of improving cardiac diastole in a subject in need thereof, the method comprising administering to the subject a therapeutically effective amount of a first pharmaceutical composition comprising an RRM1 gene and an RRM2 gene operably coupled to a first regulatory cassette, whereby cardiac diastole is improved in the subject.

[0020] In one embodiment of this or any aspect described herein, cardiac systole is also improved in the subject by said administering.

[0021] In another embodiment of this or any aspect described herein, the first regulatory cassette comprises a cardiac muscle-specific regulatory cassette.

[0022] In another embodiment of this or any aspect described herein, the cardiac muscle-specific regulatory cassette comprises a cTnT regulatory cassette.

[0023] In another embodiment of this or any aspect described herein, the method further comprises administering an effective amount of a second pharmaceutical composition comprising a μDys polypeptide operably coupled to a second regulatory cassette, wherein the second regulatory cassette is different from the first regulatory cassette.

[0024] In another embodiment of this or any aspect described herein, the first regulatory cassette comprises a cardiac muscle-specific regulatory cassette, and the second regulatory cassette comprises a striated muscle-specific regulatory cassette.

[0025] In another embodiment of this or any aspect described herein, the cardiac muscle-specific regulatory cassette comprises a cTNT regulatory cassette and the striated muscle-specific regulatory cassette comprises a CK8 regulatory cassette.

[0026] In another embodiment of this or any aspect described herein, the subject has muscular dystrophy.

[0027] In another embodiment of this or any aspect described herein, the subject's muscular dystrophy is a dystrophin-related muscular dystrophy.

### Definitions

[0028] For convenience, the meaning of some terms and phrases used in the specification, examples, and appended claims, are provided below. Unless stated otherwise, or implicit from context, the following terms and phrases include the meanings provided below. The definitions are provided to aid in describing particular embodiments, and are not intended to limit the claimed technology, because the scope of the technology is limited only by the claims. Unless otherwise defined, all technical and scientific terms used herein have the same meaning as commonly understood by one of ordinary skill in the art to which this technology belongs. If there is an apparent discrepancy between the usage of a term in the art and its definition provided herein, the definition provided within the specification shall prevail.

[0029] Definitions of common terms in immunology and molecular biology can be found in The Merck Manual of Diagnosis and Therapy, 19th Edition, published by Merck Sharp & Dohme Corp., 2011 (ISBN 978-0-911910-19-3); Robert S. Porter et al. (eds.), The Encyclopedia of Molecular Cell Biology and Molecular Medicine, published by Blackwell Science Ltd., 1999-2012 (ISBN 9783527600908); and Robert A. Meyers (ed.), Molecular Biology and Biotechnology: a Comprehensive Desk Reference, published by VCH Publishers, Inc., 1995 (ISBN 1-56081-569-8); Immunology by Werner Luttmann, published by Elsevier, 2006; Janeway's Immunobiology, Kenneth Murphy, Allan Mowat, Casey Weaver (eds.), Taylor & Francis Limited, 2014 (ISBN 0815345305, 9780815345305); Lewin's Genes XI, published by Jones & Bartlett Publishers, 2014 (ISBN-1449659055); Michael Richard Green and Joseph Sambrook, Molecular Cloning: A Laboratory Manual, 4th ed., Cold Spring Harbor Laboratory Press, Cold Spring Harbor, N.Y., USA (2012) (ISBN 1936113414); Davis et al., Basic Methods in Molecular Biology, Elsevier Science Publishing, Inc., New York, USA (2012) (ISBN 044460149X); Laboratory Methods in Enzymology: DNA, Jon Lorsch (ed.) Elsevier, 2013 (ISBN 0124199542); Current Protocols in Molecular Biology (CPMB), Frederick M. Ausubel (ed.), John Wiley and Sons, 2014 (ISBN 047150338X, 9780471503385), Current Protocols in Protein Science (CPPS), John E. Coligan (ed.), John Wiley and Sons, Inc., 2005; and Current Protocols in Immunology (CPI) (John E. Coligan, ADA M Kruisbeek, David H Margulies, Ethan M Shevach, Warren Strobe, (eds.) John Wiley and Sons, Inc., 2003 (ISBN 0471142735, 9780471142737), the contents of which are all incorporated by reference herein in their entireties.

[0030] As used herein, the term “muscular dystrophy” refers to a class of inherited diseases involving progressive weakness and loss of muscle mass. Muscular dystrophies include various forms involving mutation or dysregulation of the expression of the dystrophin gene or its protein product; dystrophin-related muscular dystrophies include Duchenne muscular dystrophy (DMD) and Becker muscular dystrophy (BMD), as well as DMD-associated dilated cardiomyopathy. Other non-limiting forms of muscular dystrophies include: myotonic muscular dystrophy, limb-girdle muscular dystrophy, facioscapulohumeral muscular dystrophy, congenital muscular dystrophy, oculopharyngeal muscular dystrophy, distal muscular dystrophy, and Emery-Dreifuss muscular dystrophy.

[0031] As used herein, the term “cardiac muscle-specific regulatory cassette” refers to a gene expression regulatory cassette that drives expression of an operatively linked gene sequence in cardiac muscle cells, but substantially not in other muscle cells (including skeletal muscle cells) or other non-muscle cells. By “substantially not” in this regard is meant that the expression of an operatively linked gene sequence is at least 20-fold lower in non-cardiac muscle cells, preferably at least 30-fold lower, at least 40-fold lower, at least 50-fold lower, at least 75-fold lower or at least 100-fold lower in non-cardiac muscle cells. Thus, a cardiac muscle-specific regulatory cassette will drive expression at least 20-fold, at least 30-fold, at least 40-fold, at least 50-fold, at least 75-fold or at least 100-fold more strongly than in non-cardiac muscle cells.

[0032] As used herein, the term “striated muscle-specific regulatory cassette” refers to a gene expression regulatory cassette that drives expression of an operatively linked gene sequence in striated muscle cells, but substantially not in non-striated muscle cells or other non-muscle tissues. By “substantially not” in this regard is meant that the expression of an operatively linked gene sequence is at least 20-fold lower in non-striated muscle cells, preferably at least 30-fold lower, at least 40-fold lower, at least 50-fold lower, at least 75-fold lower or at least 100-fold lower in non-striated muscle cells. Thus, a striated muscle-specific regulatory cassette will drive expression at least 20-fold, at least 30-fold, at least 40-fold, at least 50-fold, at least 75-fold or at least 100-fold more strongly than in non-striated muscle cells. It should be understood that cardiac muscle is a type of striated muscle—as such, a striated muscle-specific regulatory cassette will drive gene expression in cardiac, as well as in other striated muscle cells, e.g., skeletal muscle cells.

[0033] As used herein, the terms “treat,” “treatment,” “treating,” or “amelioration” refer to therapies, wherein the object is to reverse, alleviate, ameliorate, inhibit, slow down or stop the progression or severity of a condition associated with, a disease or disorder. The term “treating” includes reducing or alleviating at least one adverse effect or symptom of a condition, disease or disorder associated with a muscular dystrophy. Treatment is generally “effective” if one or more symptoms or clinical markers are reduced. Alternatively, treatment is “effective” if the progression of a disease is reduced or halted. That is, “treatment” includes not just the improvement of symptoms or markers, but also a cessation or at least slowing of progress or worsening of symptoms that would be expected in absence of treatment. Beneficial or desired clinical results include, but are not limited to, alleviation of one or more symptom(s), diminishment of extent of disease, stabilized (i.e., not worsening) state of disease, delay or slowing of disease progression, amelioration or palliation of the disease state, and remission (whether partial or total), whether detectable or undetectable. The term “treatment” of a disease also includes providing relief from the symptoms or side-effects of the disease (including palliative treatment).

[0034] As used herein “preventing” or “prevention” refers to any methodology where the disease state does not occur due to the actions of the methodology (such as, but not limited to, administration of a pharmaceutical composition or other therapeutic described herein). In one aspect, it is understood that prevention can also mean that the disease is not established to the extent that occurs in untreated controls. Accordingly, prevention of a disease encompasses a reduction in the likelihood that a subject can develop the disease, relative to an untreated subject (e.g. a subject who is not treated with the methods or compositions described herein) likely to develop the disease.

[0035] The terms “increased” or “increase” are used herein to mean an increase by a statically significant amount. In some embodiments, the terms “increased” or “increase” can mean an increase of at least 10% as compared to a reference level, for example an increase of at least about 20%, or at least about 30%, or at least about 40%, or at least about 50%, or at least about 60%, or at least about 70%, or at least about 80%, or at least about 90% or up to and including a 100% increase or any increase between 10-100% as compared to a reference level (e.g., the absence of an isolated nucleic acid molecule, polypeptide, vector, composition, or pharmaceutical composition described herein), or at least about a 2-fold, or at least about a 3-fold, or at least about a 4-fold, or at least about a 5-fold or at least about a 10-fold increase, or any increase between 2-fold and 10-fold or greater as compared to a reference level. In the context of a marker or symptom, an “increase” is a statistically significant increase in such level.

[0036] The terms “decrease”, “reduced”, “reduction”, or “inhibit” are all used herein to mean a decrease by a statistically significant amount. In some embodiments, “reduce,” “reduction” or “decrease” or “inhibit” typically means a decrease by at least 10% as compared to a reference level (e.g. the absence of an isolated nucleic acid molecule, polypeptide, vector, composition, or pharmaceutical composition described herein) and can include, for example, a decrease by at least about 10%, at least about 20%, at least about 25%, at least about 30%, at least about 35%, at least about 40%, at least about 45%, at least about 50%, at least about 55%, at least about 60%, at least about 65%, at least about 70%, at least about 75%, at least about 80%, at least about 85%, at least about 90%, at least about 95%, at least about 98%, at least about 99%, or more. As used herein, “reduction” or “inhibition” does not encompass a complete inhibition or reduction as compared to a reference level. “Complete inhibition” is a 100% inhibition as compared to a reference level.

[0037] As used herein, a “subject” means a human or animal. Usually the animal is a vertebrate such as a primate, rodent, domestic animal or game animal. Primates include, for example, chimpanzees, cynomolgus monkeys, spider monkeys, and macaques, e.g., Rhesus. Rodents include, for example, mice, rats, woodchucks, ferrets, rabbits and hamsters. Domestic and game animals include, for example, cows, horses, pigs, deer, bison, buffalo, feline species, e.g., domestic cat, canine species, e.g., dog, fox, wolf, avian species, e.g., chicken, emu, ostrich, and fish, e.g., trout, catfish and salmon. In some embodiments, the subject is a mammal, e.g., a primate, e.g., a human. The terms, “individual,” “patient” and “subject” are used interchangeably herein.

[0038] Preferably, the subject is a mammal. The mammal can be a human, non-human primate, mouse, rat, dog, cat, horse, or cow, but is not limited to these examples. Mammals other than humans can be advantageously used as subjects that provide animal models of disease e.g., cardiac disease or disorder, such as myocardial infarction or myocardial ischemia. A subject can be male or female.

[0039] A subject can be one who has been previously diagnosed with or identified as suffering from or having a condition in need of treatment (e.g., muscular dystrophy) or one or more complications related to such a condition, and optionally, have already undergone treatment for the condition or the one or more complications related to the condition. Alternatively, a subject can also be one who has not been previously diagnosed as having such condition or related complications. For example, a subject can be one who exhibits one or more risk factors for the condition or one or more complications related to the condition or a subject who does not exhibit risk factors.

[0040] A “subject in need” of treatment for a particular condition can be a subject having that condition (e.g., muscular dystrophy or a complication thereof), diagnosed as having that condition, or at risk of developing that condition. As non-limiting examples, a subject diagnosed with or suffering from a given condition, a subject determined to have a mutation predisposing to a given condition, and a subject whose parent or sibling is known to carry a mutation predisposing to a given condition are each subjects in need of treatment.

[0041] In some embodiments, a polypeptide described herein (or a nucleic acid encoding such a polypeptide) can be a functional fragment of one of the polypeptides described herein, e.g., a functional fragment of a dystrophin (including a μDys), RRM1 or RRM2 polypeptide.

[0042] The term “statistically significant” or “significantly” refers to statistical significance and generally means a two standard deviation (2SD) or greater difference.

[0043] As used herein the term “comprising” or “comprises” is used in reference to compositions, methods, and respective component(s) thereof, that are essential to the method or composition, yet open to the inclusion of unspecified elements, whether essential or not.

[0044] As used herein the term “consisting essentially of” refers to those elements required for a given embodiment. The term permits the presence of additional elements that do not materially affect the basic and novel or functional characteristic(s) of that embodiment of the invention.

[0045] The singular terms “a,” “an,” and “the” include plural referents unless context clearly indicates otherwise. Similarly, the word “or” is intended to include “and” unless the context clearly indicates otherwise.

[0046] Although methods and materials similar or equivalent to those described herein can be used in the practice or testing of this disclosure, suitable methods and materials are described below. The abbreviation, “e.g.” is derived from the Latin exempli gratia, and is used herein to indicate a non-limiting example. Thus, the abbreviation “e.g.” is synonymous with the term “for example.”

### BRIEF DESCRIPTION OF THE DRAWINGS

[0047] The patent or application file contains at least one drawing executed in color. Copies of this patent application publication with color drawings will be provided by the Office upon request and payment of the necessary fee.

[0048] FIG. 1A shows a graphic representation of rAAV6 vectors utilized in the present disclosure. The ribonucleotide reductase vector contains the human cDNA for the RRM1 and RRM2 subunits whose expression is driven by the cardiac specific (cTnT455) regulatory cassette (RC). The human micro-dystrophin (ΔR2-R15/ΔR18-R22/ΔCT) vector has expression driven by the CK8 muscle specific RC. The control vector utilized in the present study carries the firefly luciferase transgene whose CMV early promoter/enhancer RC has been deleted. FIG. 1B shows an outline of animal enrollment, vector administration, and experimental protocols implemented following a treatment period of 5 months.

[0049] FIG. 2 shows Kaplan Meier analysis was performed on mdx^{4cv} mice treated with control vector (mdx^{4cv}, n=6), ribonucleotide reductase (mdx^{4cv}+RNR, n=6), or micro-dystrophin (mdx^{4cv}+μDys, n=5). All mice were followed for 20 weeks post injection.

[0050] FIG. 3A-3D shows hearts isolated from mdx^{4cv} mice treated with control vector (mdx^{4cv}, n=6), ribonucleotide reductase (mdx^{4cv}+RNR, n=6), or micro-dystrophin (mdx^{4cv}+μDys, n=5). Age-matched, non-diseased, non-treated wild-type mice were used as controls (WT, n=8). All hearts were perfused with a glucose-pyruvate buffer. Functional assessment was performed at spontaneous heart rates. FIG. 3A shows left ventricular developed pressure (LVDevP, the difference between systolic and diastolic pressures). FIG. 3B shows rate pressure product (RPP, the product of LVDevP and HR). FIG. 3C shows positive rate of pressure change calculated by the first derivative of the ascending LV pressure wave (+dP/dt), used as an index of ventricular contractility. FIG. 3D shows negative rate of pressure change calculated by the first derivative of the descending LV pressure wave (−dP/dt), used as an index of ventricular relaxation. *P<0.05 mdx^{4cv} vs. WT; #P<0.05 mdx^{4cv}+RNR vs. mdx^{4cv}.

[0051] FIG. 4A-4E shows hearts isolated from mdx^{4cv} mice treated with control vector (mdx^{4cv}, n=6), ribonucleotide reductase (mdx^{4cv}+RNR, n=6), or micro-dystrophin (mdx^{4cv}+μDys, n=5). Age-matched, non-diseased, non-treated wild-type mice were used as controls (WT, n=8). The pressure-volume relationship (i.e., Frank-Starling mechanism) was evaluated by gradually increasing the volume of the LV balloon. Hearts were paced at 450 bpm throughout the protocol. FIG. 4A shows left ventricular systolic pressure (LVSP). FIG. 4B shows LV end-diastolic pressure (LVEDP). FIG. 4C shows left ventricular developed pressure (LVDevP, the difference between systolic and diastolic pressures). FIG. 4D shows negative rate of pressure change calculated by the first derivative of the descending LV pressure wave (−dP/dt), and is used as an index of ventricular relaxation. FIG. 4E shows positive rate of pressure change was calculated by the first derivative of the ascending LV pressure wave (+dP/dt), and is used as an index of ventricular contractility. *P<0.05 mdx^{4cv} vs. WT; #P<0.05 mdx^{4cv}+RNR vs. mdx^{4cv}; $ P<0.05 mdx^{4cv}+μDys vs. mdx^{4cv}.

[0052] FIG. 5A-5D shows hearts isolated from mdx^{4cv} mice treated with control vector (mdx^{4cv}, n=6), ribonucleotide reductase (mdx^{4cv}+RNR, n=6), or micro-dystrophin (mdx^{4cv}+μDys, n=5). Age-matched, non-diseased, non-treated wild-type mice were used as controls (WT, n=4). All hearts were perfused with a glucose-pyruvate buffer containing high calcium (4.0 mmol/L) to simulate a high workload challenge for 20 min. Hearts were paced at 450 bpm throughout the protocol. FIG. 5A shows left ventricular developed pressure (LVDevP, the difference between systolic and diastolic pressures). FIG. 5B shows rate pressure product (RPP, the product of LVDevP and HR). FIG. 5C shows positive rate of pressure change calculated by the first derivative of the ascending LV pressure wave (+dP/dt), is used as an index of ventricular contractility. FIG. 5D shows negative rate of pressure change calculated by the first derivative of the descending LV pressure wave (−dP/dt), is used as an index of ventricular relaxation. *P<0.05 mdx^{4cv} vs. WT; #P<0.05 mdx^{4cv}+RNR vs. mdx^{4cv}; $ P<0.05 mdx^{4cv}+μDys vs. mdx^{4cv}.

[0053] FIG. 6 demonstrates that 5-months following vector administration, cryosections were prepared and immunostained with antisera against dystrophin or ribonucleotide reductase. A considerable level of protein is detected for each ribonucleotide reductase subunit-1 (human specific) as indicated by immunofluorescent staining (Red) localized primarily within the cytoplasm of cardiomyocytes with occasional perinuclear accumulation (upper panel). Noteworthy on the lower panel, is the robust level of expression for dystrophin in WT and in aged mdx^{4cv} mice treated with AAV6-CK8-micro-dystrophin (laminin staining, inset image).

[0054] FIG. 7 shows a representative full-view photomicrographs of Masson trichrome staining of the hearts from mdx^{4cv} mice displaying control vector (4CMV), and rAAV6-treated with either RNR or μDys from mdx^{4cv} mice. Similarly, 20× enlarged view of the corresponding images (*) is shown.

[0055] FIG. 8A shows body weights and FIG. 8B shows heart weights were obtained from mdx^{4cv} mice treated with control vector (mdx^{4cv}, n=6), ribonucleotide reductase (mdx^{4cv}+RNR, n=6), or micro-dystrophin (mdx^{4cv}+μDys, n=5). FIG. 8C shows heart weights (HW) normalized to body weights (BW) to obtain HW/BW ratio. No statistical differences were noted among the variables.

[0056] FIG. 9A shows RNR and μDys protein expression detection as revealed by immunoblotting of cardiac whole tissue lysates using either RRM1, RRM2 or anti-dystrophin antibody. FIG. 9B shows HPLC-MS/MS intracellular [dATP] quantification from methanol extracted cardiac tissue. FIG. 9C shows qPCR analysis of vector genomes from cardiac tissue revealed similar vector genomes being represented for all treated cohorts.

[0057] FIG. 10 shows The presence of empty capsids aided the transduction efficiency of AAV6 and AAV9 in mature human myotube cultures, but appear to hinder that of AAV9 in MM14 cultures. The transduction efficiency of AAV8 was the lowest compared to AAV6 and 9 in mouse and human mature myotube cultures, but was similar to AAV6 in canine myotube cultures. In contrast, AAV9 transduced poorly in canine myotube cultures.

[0058] FIG. 11A-11B shows Intravenous dose response of rAAV6-CMV-hPLAP transduction in striated muscle. Mice were injected via tail vein with increasing doses of vector, and tissues harvested 2 weeks post-injection. FIG. 11A shows chemiluminescent assay of alkaline phosphatase activity in muscle lysates. RLU, relative light units. The data represent mean values±SEM (n=3 for all cohorts except 0 vg, n=7; 1.3×10¹² vg, n=7; 2.5×10¹², n=4). FIG. 11B shows representative sections of muscles stained for alkaline phosphatase activity from mice receiving increasing doses of vector. Hrt, heart; Dia, diaphragm; TA, tibialis anterior. Scale bar=100 μm.

[0059] FIG. 12A-12C shows effect of empty capsids on intravenous administration of rAAV6-CMV-hPLAP. Mice were injected with 1.3×10¹² vector genomes of “full capsids”±empty capsids of various serotypes. FIG. 12A shows representative sections of muscles stained for alkaline phosphatase activity. Hrt, heart; Dia, diaphragm; Sol, soleus; Liv, liver. Scale bar=100 um. FIG. 12B shows chemiluminescent assay of alkaline phosphatase activity in tissue lysates. FIG. 12C shows vector genomes normalized to diploid mouse genomes, quantified by qPCR to either the vector sequence or sequence of the murine LDL receptor. The data in (FIG. 12B-12C) represent mean values±SEM. (Fulls alone, +AAV1 empties, +AAV6 empties: n=5; +AAV2 empties, +AAV8 empties: n=4)<0.05, ** P<0.01 vs. “rAAV6 Fulls” by one-way ANOVA with Dunnett's post-test. For (FIG. 12B-12C), note the different scales on the ordinate for each tissue.

[0060] FIG. 13A-13F shows that various engineered RNRs can increase dATP activity in both young and old mdx^{4cv} mouse hearts. Vector comparisons are saline (control=no AAV), a promotor-less construct (A-RNR), cTnT promotor (cTnT-RNR), CK8e promotor (CK8-RNR), CK8e with double mutation in RRM2 to resist ubiquitination (CK8-RNR-DM, CK8e-R1.R2dm), CK8m with RNR double mutation (CK8mR1.R2dm) and CK8e with a different (gene) R2 subunit (CK8e-R1.R2b) that is naturally degradation resistant. Data are presented as quantity in pmol/mg tissue (top graphs) and as a % of the ATP pool (bottom graphs). FIG. 13A-13C shows the dATP content in ventricular tissues (pmol/mg). FIG. 13A shows dATP content in old mice that received a promotor-less (A-RNR), a cTnT promotor (cTnT-RNR), and a CK8e promotor (CK8-RNR). FIG. 13B shows dATP content in young mice that received a promotor-less (A-RNR), a cTnT promotor (cTnT-RNR), a CK8e promotor (CK8-RNR), and a CK8e with double mutation in RRM2 (CK8-RNR-DM). FIG. 13C shows dATP content in young mice that received saline (control), rAAV-6-CK8e-R1R2, rAAV-CK8e-R1.R2dm, and rAAV6-CK8e-R1R2b, compared with un-injected mice. FIG. 13D-13F shows dATP as % of total ATP pool as in FIG. 13A-13C.

### DETAILED DESCRIPTION

[0061] Duchenne Muscular Dystrophy (DMD) and its milder and allelic form, Becker muscular dystrophy (BMD), are the most frequent muscular dystrophies, occurring once in ˜5000 male births, and are due to mutations in the dystrophin gene (1). DMD patients typically die due to cardiac and respiratory muscle failure; thus, maintenance of adequate function in both cardiac and skeletal muscle is important for optimal DMD therapy. The primary function of dystrophin is to provide a structural role by mechanically linking the subsarcolemmal cytoskeleton to the extracellular matrix (ECM) through the dystrophin-glycoprotein complex (DGC) (2). This linkage transmits the forces of contraction to the extracellular matrix (ECM) and protects muscles from contraction-induced injury (3-7). In addition to a structural or mechanical role, the DGC also serves as a scaffold for cytoplasmic and membrane-associated signaling proteins and ion channels (8-11). The complete absence of dystrophin results in drastic reductions of all DGC components (12-14). Together, an absence of dystrophin and reduction in the DGC components causes membrane destabilization and permeability defects that lead to myofiber degeneration, repeated cycles of degeneration/regeneration, and the gradual replacement of muscle fibers with fibrotic, connective, and adipose tissue.

[0062] In contrast, some in-frame deletions, truncations, and missense mutations lead to reduced dystrophin expression associated with milder phenotypes. These pathologies are largely curtailed in mouse (mdx) and canine (cxmd) models of DMD following the vector mediated delivery of muscle-specific expression of highly functional miniaturized versions of dystrophin, micro-dystrophin (μDys) (15-24). In mdx mice, muscle pathology may be milder than in humans; however, the dystrophic phenotype may worsen with increasing age including the development of cardiac dysfunction (25-32). Administration of rAAV-mediated μDys therapy in mdx mice preceding the onset of cardiomyopathy may be highly cardioprotective (33-35). However, when mdx mice are treated with μDys at a late stage of cardiomyopathy, such as would be the case for a number of DMD patients, a full rescue of the dysfunctional cardiac phenotype is not achieved (30,35-37).

[0063] The present disclosure relates to a cardiac function-enhancing gene therapy approach that targets myosin in contractile filaments and overexpresses the enzyme ribonucleotide reductase (RNR). RNR converts ADP to deoxy-ADP (dADP), which can be rapidly converted to dATP in cells. In numerous in vitro studies, it has been shown that dATP can increase cross bridge binding and cycling, which results in stronger, faster contraction and faster relaxation (38-46). Furthermore, dATP can improve the contractile properties of the myocardium from end-stage human heart failure (HF) in vitro (43) and in dog models with end-stage idiopathic dilated cardiomyopathy (47). In normal rodent muscle, increases in cardiomyocyte and cardiac function can occur with as little as ˜1% of the ATP pool in the dATP form (40,48). Similarly, rAAV-mediated delivery of RNR under cardiac specific regulatory control can result in enzyme overexpression exclusively in cardiomyocytes and significantly improved left ventricular function without adverse cardiac remodeling in normal and infarcted rodent hearts (49). Thus, dATP can rescue the pre-load responsiveness of failing hearts, restoring the pressure and volume to normal.

[0064] In the working examples, the relative therapeutic capacity of muscle-specific microdystrophin (μDys) or ribonucleotide reductase (RNR), via intravenously administered recombinant adeno-associated viral (rAAV) vectors in an advanced age, DMD cardiomyopathy mouse model, were compared. A restoration of myocardial workload was demonstrated as indicated by rate pressure product (RPP), for baseline function in mdx^{4cv} mice treated with RNR. This outcome was primarily attributed to the normalization of left ventricular developed pressure (LVDevP). Although mdx^{4cv} mice treated with μDys appeared to normalize LVDevP, this did not result in a significant increase in RPP. Upon further evaluation of cardiac function, the pressure-volume relationship revealed that systolic pressure response with increased preload was significantly improved with the treatment of either RNR or μDys. However, only RNR treatment resulted in significant improvements in diastolic functional parameters, returning them to values that were similar to wild-type control hearts. As a further assessment of cardiac function, hearts were tested using a high workload challenge protocol. Both RNR and μDys treatments improved systolic function in mdx^{4cv} hearts without compromising cardiac reserve. The results in the examples described herein demonstrate that targeted expression of RNR within the myocardium significantly improves contractile performance in an advanced age model of DMD cardiomyopathy and can be a valuable therapeutic for the prevention and treatment of muscular dystrophy and DMD patients. Surprisingly, cardiac-specific expression of RNR improved systolic and diastolic function of the heart to a greater extent than striated muscle-specific expression of RNR, despite the actual level of RNR driven in cardiac cells by a cardiac-specific regulatory cassette being lower than expression from the striated muscle-specific cassette.

### Muscular Dystrophy

[0065] Compositions and methods are provided herein for treating muscular dystrophy by delivering one or more constructs encoding ribonucleotide reductase (RNR) activity to muscle in a subject in need thereof. In some embodiments, the construct is delivered alone—i.e., no other therapeutic constructs are delivered, and the RNR improves muscle function, including but not limited to cardiac muscle function, in a manner effective to treat the muscular dystrophy. In other embodiments, the construct is delivered in combination with one or more additional constructs encoding one or more additional therapeutic polypeptides. In such embodiments, the additional therapeutic polypeptide can encode, for example, a microdystrophin. The combination of RNR and microdystrophin can together attack both structural (dystrophin-related) and functional (dATP supply) deficits that contribute to the pathology, thereby more significantly improving muscular function. Where the RNR is driven by a cardiac muscle specific regulatory element or cassette, the benefit in countering cardiomyopathy stemming from muscular dystrophy can be pronounced.

[0066] There are several types of muscular dystrophy, including but not limited to: (1) myotonic dystrophies, generally characterized by an inability to relax muscles following contractions; (2) facioscapulohumeral (FSHD) dystrophies, characterized by muscle weakness typically beginning in the face, hip and shoulders, onset of FSHD usually occurs in the teenage years but can begin in childhood or as late as age 50; (3) congenital muscular dystrophy, that affects boys and girls and is apparent at birth or before age 2; and (4) limb-girdle muscular dystrophies, generally characterized by hip and shoulder muscle weakness, difficulty lifting the foot, and frequent tripping. Complications of muscular dystrophy include for example, trouble walking, difficulty using arms or legs, shortening of muscles or tendons, breathing problems, scoliosis, cardiovascular failure and arrhythmias, and swallowing problems.

[0067] Duchenne muscular dystrophy (DMD) is a recessively-inherited muscular dystrophy that affects approximately 1 in 3500 males. DMD patients carry a mutation in the dystrophin gene that causes aberrant expression or loss of expression of the dystrophin protein. DMD patients experience progressive wasting of skeletal muscles and cardiac dysfunction, which leads to loss of ambulation and premature death, primarily due to cardiac or respiratory failure.

[0068] An absence of dystrophin and reduction in the dystrophoin-glycoprotein complex (DGC) components causes membrane destabilization and permeability defects that lead to myofiber degeneration, repeated cycles of degeneration/regeneration, and the gradual replacement of muscle fibers with fibrotic, connective, and adipose tissue. This effect can lead to decreased systolic and diastolic performance in DMD hearts.

[0069] Current available treatments for DMD are generally only able to slow the pathology of DMD (see Emery, A. E. H. and Muntoni, F., Duchenne Muscular Dystrophy, Third Edition (Oxford University Press, 2003)). Gene therapy approaches for DMD have been demonstrated in dystrophic animal models by either directly targeting a class of mutations, as with exon skipping, or replacing the mutated gene with viral-vector mediated delivery (see Koo, T. and Wood, M. J. Human Gene Therapy 24, (2013); Benedetti, S., et al., The FEBS Journal 280, 4263-4280, (2013); and Seto, J. T., et al., Current Gene Therapy 12, 139-151 (2012)). Recombinant adeno-associated virus (rAAV) vectors are a potential vehicle for gene therapy, being already tested in clinical trials for both DMD and limb-girdle muscular dystrophies (see Mendell, J. R., et al., The New England Journal of Medicine 363, 1429-1437, (2010); Mendell, J. R., et al., Annals of Neurology 68, 629-638 (2010); and Herson, S., et al., Brain: A Journal of Neurology 135, 483-492, (2012)). Several serotypes of adeno-associated virus (AAV) demonstrate a high degree of tropism for striated muscles (see Seto, J. T., et al., Current Gene Therapy 12, 139-151 (2012)).

[0070] Pre-clinical studies designing and testing newer generations of therapeutic constructs for DMD can be confined by the approximately 4.9 kb size of a single-stranded rAAV vector genome (see Dong, B., et al., Molecular Therapy: The Journal of the American Society of Gene Therapy 18, 87-92, (2010) and Wu, Z., et al., Molecular Therapy: The Journal of the American Society of Gene Therapy 18, 80-86, (2010)). Packaging the entire approximately 13.9 kb cDNA of the muscle-specific isoform of dystrophin into a single rAAV capsid cannot be achieved, accordingly, miniaturized, synthetic versions of the muscle-specific isoform of dystrophin cDNA may be used.

[0071] Although in vivo recombination of two and three rAAV vector genomes has been demonstrated to deliver a mini- or full-length dystrophin coding sequence (see, Odom, G. L., et al., Molecular Therapy: The Journal of the American Society of Gene Therapy 19, 36-45, (2011); Lostal, W., et al., Human Gene Therapy, (2014); and Koo, T., et al., Human Gene Therapy 25, 98-108, (2014)), the efficiency of delivering multiple vectors for reconstituting full-length dystrophin may be suboptimal and can increase the overall dose of viral capsid proteins needed for delivering vectors. However, beneficial rAAV-mediated gene therapy has been achieved using rationally-designed miniature versions of the dystrophin cDNA based in part on mRNA expressed in mild Becker muscular dystrophy patients carrying in-frame deletions within the gene (see Beggs, A. H., et al., American Journal of Human Genetics 49, 54-67 (1991); Koenig, M., et al., American Journal of Human Genetics 45, 498-506 (1989); Goldberg, L. R., et al., Annals of Neurology 44, 971-976, (1998); and England, S. B., et al., Nature 343, 180-182 (1990)). Studies in transgenic and vector treated dystrophic mice expressing various dystrophin truncations have identified several elements of the dystrophin gene that need to be present in a functional micro-dystrophin (μDys) (see Harper, S. Q., et al., Nature Medicine 8, 253-261, (2002)). See additional below re: microdystrophins.

[0072] The methods provided herein provide a cardiac function-enhancing approach to therapeutically treat muscular dystrophy by targeting myosin in contractile filaments via overexpression of ribonucleotide reductase (RNR) without adverse cardiac remodeling (see, e.g., Kolwicz et al. JACC Vol 4, No 7, 2019, which is incorporated herein by reference in its entirety).

[0073] The nucleic acid constructs provided herein affect the cardiac pressure-volume relationship by significantly improving systolic preload response. Accordingly, administration of RNR alone can improve diastolic (at rest) functional parameters of the dystrophic heart in animal models of DMD, a surprisingly beneficial effect of the compositions described herein. This is because current therapeutics targeting cardiovascular complications of DMD only improve structural and/or systolic (contraction) function of the heart and do not necessarily improve diastolic function or cardiovascular energetics. Where most therapies for muscle-related cardiac pathologies focus on improving contraction, a therapeutic approach that improves diastolic function or relaxation can improve the efficiency of the heart because improved relaxation permits a greater volume of blood to enter the chamber before contraction drives it out.

[0074] Methods of measuring cardiac function and energetics (e.g., pressure and volume) in a subject include, but are not limited to, echocardiography, magnetocardiogram, and a Langendorff perfusion in a test animal. See also, e.g., Kolwicz S C, Jr. and Tian R. Assessment of cardiac function and energetics in isolated mouse hearts using 31P NMR spectroscopy. J Vis Exp. 2010; 42: e2069.

[0075] Given that the RNR increases dATP in the heart, the nucleic acid constructs described herein can be used prophylactically to support cardiac function in subjects with muscular dystrophy and prevent or decrease the severity of cardiovascular complications. As shown in the working examples, RNR overexpression results in elevated dATP, which can be used by cardiac myosin (in place of ATP), and increases cross-bridge binding and cycling, resulting in stronger, faster contraction and faster relaxation in mouse models of DMD.

### Dystrophins

[0076] The full-length striated muscle isoform of dystrophin plays a role in transmitting contractile force through the sarcolemma and out to the extracellular matrix. In addition to maintaining the mechanical link between the intracellular cytoskeleton and the membrane bound dystrophin glycoprotein complex (DGC), dystrophin can also be a scaffold for signaling proteins (see e.g., Ozawa, E. in Myology (ed. Franzini-Armstrong C Engel A) 455-470 (McGraw-Hill, 2004); Winder, S. J. Journal of Muscle Research and Cell Motility 18, 617-629 (1997); and Campbell, K. P. and Kahl, S. D. Nature 338, 259-262, (1989)), which are incorporated herein by reference in their entireties. The amino-terminal domain of dystrophin can bind to F-actin filaments of the intracellular cytoskeleton (see e.g., Way, M., et al., FEBS Letters 301, 243-245 (1992); Hemmings, L., et al., The Journal of Cell Biology 116, 1369-1380 (1992); Fabbrizio, E., et al., Biochemistry 32, 10457-10463 (1993); and Pavalko, F. M. and Otey, C. A. Proceedings of the Society for Experimental Biology and Medicine 205, 282-293 (1994), which are incorporated herein by reference in their entireties). The human dystrophin gene, mRNA and polypeptide sequences is known in the art, see, e.g., SEQ ID NO: 31-33, or a variant thereof.

[0077] The middle, rod domain is the largest and is composed of 24 spectrin-like repeats (SRs) that are flanked and interspersed with at least four hinge sub-domains. The rod domain can give dystrophin elasticity and flexibility for maintaining the integrity of the sarcolemma during muscle contractility (see Winder, S. J. Journal of Muscle Research and Cell Motility 18, 617-629 (1997)). Various SRs provide unique regions that can serve as additional binding sites for the intracellular cytoskeleton, the sarcolemma, as well as members of the DGC (see Rybakova, I. N., et al., The Journal of Cell Biology 135, 661-672 (1996); Warner, L. E., et al., Human Molecular Genetics 11, 1095-1105 (2002); Metzinger, L., et al., Human Molecular Genetics 6, 1185-1191 (1997); Lai, Y., et al., The Journal of Clinical Investigation 119, 624-635, (2009)). In particular, the cysteine-rich domain and the adjacent Hinge 4 region form the (3-dystroglycan binding domain (Dg BD) (see Blake, D. J., et al., Physiological Reviews 82, 291-329, (2002); Ishikawa-Sakurai, M., et al., Human Molecular Genetics 13, 693-702, (2004)), while the carboxy-terminal domain is a scaffold for additional DGC components (see Abmayr S, in Molecular Mechanisms of Muscular Dystrophies (ed. Winder, S. J.) 14-34 (Landes Biosciences, 2006)).

[0078] Partially functional micro-dystrophins can improve the dystrophic pathology in striated muscle by protecting the sarcolemma from contraction-induced injury and increasing the capacity to generate force. These parameters can be achieved by binding to F-actin filaments and β-dystroglycan through the amino-terminal domain and the Dg BD (see Harper, S. Q., et al., Nature Medicine 8, 253-261, (2002); Warner, L. E., et al., Human Molecular Genetics 11, 1095-1105 (2002); Cox, G. A., et al., Nature Genetics 8, 333-339, (1994); Greenberg, D. S., et al., Nature Genetics 8, 340-344, (1994); Gardner, K. L., et al., Gene Therapy 13, 744-751, (2006); Corrado, K., et al., The Journal of Cell Biology 134, 873-884 (1996); and Rafael, J. A., et al., The Journal of Cell Biology 134, 93-102 (1996)). Without being bound by any one particular theory, prior studies indicate these two domains must be connected by at least four SRs from the central rod domain, but there are numerous ways in which miniaturized dystrophins containing at least four SRs can be constructed. While some combinations of SRs have been shown to improve the dystrophic pathophysiology, other combinations have not yielded proteins with significant functional capacity (see Harper, S. Q., et al., Nature Medicine 8, 253-261, (2002) and Abmayr S, in Molecular Mechanisms of Muscular Dystrophies (ed. Winder, S. J.) 14-34 (Landes Biosciences, 2006)). Selection of specific SRs in μDys design can restore additional DGC components to the sarcolemma. Neuronal nitric oxide synthase (nNOS) is a signaling protein that can be involved in vasodilation in response to muscle contractile activity (see Stamler, J. S. and Meissner, G. Physiological Reviews 81, 209-237 (2001); Brenman, J. E., et al., Cell 82, 743-752 (1995); Kobayashi, Y. M., et al., Nature 456, 511-515, (2008); and Torelli, S., et al., Neuropathology and Applied Neurobiology 30, 540-545, (2004)), and the presence of SRs 16 and 17 can be involved in proper association of nNOS with the DGC (see 28 Lai, Y. et al., The Journal of Clinical Investigation 119, 624-635, (2009) and Lai, Y., et al., Proceedings of the National Academy of Sciences of the United States of America 110, 525-530, (2013)).

[0079] Sequences within spectrin-like repeats 20-24 as well as Hinge 4 can play a role in proper association of dystrophin with microtubules, which can be important for maintaining the intracellular architecture and torque production in skeletal muscle (see Prins, K. W. et al., The Journal of Cell Biology 186, 363-369, (2009) and Belanto, J. J., et al., Proceedings of the National Academy of Sciences of the United States of America 111, 5723-5728, (2014)). Nonetheless, the carboxy-terminal domain and most of the SR domains have been found dispensable without severely compromising the health of striated muscles (see McCabe, E. R., et al., The Journal of Clinical Investigation 83, 95-99, (1989); Crawford, G. E., et al., The Journal of Cell Biology 150, 1399-1410 (2000); and Dunckley, M. G., et al., FEBS Letters 296, 128-134 (1992)).

[0080] Any micro-dystrophin (referred to herein as μDys or mDys) known in the art can be administered in combination with the RNR constructs described herein. By way of example only, the RNR constructs described herein can be administered in combination with any of the micro-dystrophins described in Ramos et al. “Development of novel micro-dystrophins with enhanced functionality.” Mol Ther 2019; 27:623-635; (2019) and/or the micro-dystrophins described in U.S. Pat. No. 10,479,821 B2, the contents of each of which is incorporated herein by reference in their entirety. In some embodiments, the micro-dystrophin comprises amino sequence SEQ ID NO: 34, a nucleic acid encoding SEQ ID NO: 34, a fragment, or a variant thereof.

### Ribonucleotide Reductase (RNR)

[0081] Ribonucleotide reductase (RNR), also known as ribonucleotide diphosphate reductase (rNDP), is an enzyme that catalyzes the reaction of ribonucleotides to deoxyribonucleotides, which are essential components in the synthesis of DNA. RNR is conserved in all living organisms. The RNR enzyme catalyzes the de novo synthesis of dNDPs. Catalysis of ribonucleoside 5′-diphosphates (NDPs) involves a reduction at the 2′-carbon of ribose 5-phosphate to form the 2′-deoxy derivative-reduced 2′-deoxyribonucleoside 5′-diphosphates (dNDPs). This reduction is initiated with the generation of a free radical. Following a single reduction, RNR requires electrons donated from the dithiol groups of the protein thioredoxin, which is regenerated via NADPH mediated reduction of disulfide groups of thioredoxin.

[0082] Three classes of RNR have similar mechanisms for the reduction of NDPs. All classes use free-radical chemistry. Class I reductases use an iron center with ferrous to ferric conversion to generate a tyrosyl free radical. Reduction of NDP substrates occurs under aerobic conditions. Class I reductases are divided into IA and IB due to differences in regulation. Class IA reductases are distributed in eukaryotes, eubacteria, bacteriophages, and viruses. Class IB reductases are found in eubacteria. Class IB reductases can also use a radical generated with the stabilization of a binuclear manganese center. Class II reductases generate the free radical 5′-deoxyadenosyl radical from cobalamin (coenzyme B12) and have a simpler structure than class I and class III reductases. Reduction of NDPs or ribonucleotide 5′-triphosphates (NTPs) occurs under either aerobic or anaerobic conditions. Class II reductases are distributed in archaebacteria, eubacteria, and bacteriophages. Class III reductases use a glycine radical generated with the help of an S-adenosyl methionine and an iron sulphur center. Reduction of NTPs is limited to anaerobic conditions. Class III reductases are distributed in archaebacteria, eubacteria, and bacteriophages. Organisms are not limited to having one class of enzymes. For example, E. coli have both class I and class III RNR. The RNR complex consists of two subunits—RRM1 and RRM2. The larger RRM1 subunit contains the catalytic site and 2 allosteric sites that can bind dATP, whereas the smaller RRM2 subunit contains the free radical generator. The RNR complex is tightly allosterically regulated, with ≤5% of the ATP pool present as dATP. Each RNR1 monomer consists of three domains: (1) one mainly helical domain comprising the 220 N-terminal residues; (2) a second large ten-stranded α/β structure comprising 480 residues; and (3) a third small five-stranded α/β structure comprising 70 residues.

[0083] As used herein, “RRM1” or “ribonucleotide reductase catalytic subunit M1” or “an RRM1 construct” refers to the large, catalytic site containing, subunit of the RNR complex. Sequences for RRM1 are known for a number of species, e.g., human RRM1 (NCBI Gene ID: 6240) mRNA (NCBI Ref Seq: NM_001033.5) and polypeptide (NCBI Ref Seq: NP_001024.1). In some embodiments of any of the aspects, the RRM1 nucleic acid or polypeptide can be an isoform, ortholog, variant, and/or allele of SEQ ID NO: 1-SEQ ID NO: 12, respectively.

[0084] As used herein, “RRM2” or “ribonucleotide reductase catalytic subunit M2” or an “RRM2 construct” refers to the small subunit of the RNR complex. Sequences for RRM2 are known for a number of species, e.g., human RRM2 (NCBI Gene ID: 6241) mRNA (NCBI Ref Seq: NM_001034.4) and polypeptide (NCBI Ref Seq: NP_001025.1). In some embodiments of any of the aspects, the RRM2 nucleic acid or polypeptide can be an isoform, ortholog, variant, and/or allele of SEQ ID NO: 13-SEQ ID NO: 24, respectively. RRM1 and RRM2 proteins as described herein need to be capable of forming an active RNR complex. Brignole et al., eLife 2018; 7:e31502, which is incorporated herein by reference, describes a 3.3A resolution cryo-EM structure of human ribonucleotide reductase complexed with substrate and allosteric regulators (ATP and dATP)—this near-atomic resolution structure illustrates amino acids and structural domains in the two subunits that interact with each other and illustrates domains necessary for allosteric regulation.

[0085] One aspect described employs expression of an RNR complex comprising, consisting of, or consisting essentially of, wild type RRM1 and RRM2 proteins. As used herein, “RNR complex” refers to an RRM1 polypeptide and an RRM2 polypeptide in physical association with each other in the form that provides RNR activity. In this context, the RRM1 and/or RRM2 polypeptide can be a variant that differs in one or more amino acids from the wild-type yet retains the ability to complex with the respective RRM subunit and to catalyze the generation of dATP. One skilled in the art can assess whether the RNR complex is formed, for example, by sucrose gradient analysis or co-immunoprecipitation under non-denaturing conditions. In certain embodiments, it is contemplated that a variant of either or both of RRM1 and/or RRM2 is delivered in one or more therapeutic constructs. Variants include, for example, versions of either or both polypeptides that are rendered more stable, e.g., by modification of a cleavage substrate site for one or more degrading enzymes. Examples are described, for example in U.S. Ser. No. 16/457,441, which is incorporated herein by reference. The increased stability of, e.g., the RRM2 subunit can provide increased activity of the RNR complex.

[0086] Where it is important to maintain the function of a variant polypeptide, i.e., complex formation of a mutant RRM2 with RRM1 and/or ribonucleotide reductase activity in complex with RRM1, it can be beneficial to modify a site or sites via conservative amino acid substitution(s). In a conservative substitution, a given amino acid can be replaced by a residue having similar physicochemical characteristics, e.g., substituting one aliphatic residue for another (such as Ile, Val, Leu, or Ala for one another), or substitution of one polar residue for another (such as between Lys and Arg; Glu and Asp; or Gln and Asn). Other such conservative substitutions, e.g., substitutions of entire regions having similar hydrophobicity characteristics, are well known. Polypeptides comprising conservative amino acid substitutions can be tested in any one of the assays described herein to confirm that a desired activity, e.g., complex formation with Rrm1 and/or ribonucleotide reductase activity for the Rrm1/Rrm2 mutant polypeptide complex is retained.

[0087] Amino acids can be grouped according to similarities in the properties of their side chains (in A. L. Lehninger, in Biochemistry, second ed., pp. 73-75, Worth Publishers, New York (1975)): (1) non-polar: Ala (A), Val (V), Leu (L), Ile (I), Pro (P), Phe (F), Trp (W), Met (M); (2) uncharged polar: Gly (G), Ser (S), Thr (T), Cys (C), Tyr (Y), Asn (N), Gln (Q); (3) acidic: Asp (D), Glu (E); (4) basic: Lys (K), Arg (R), His (H). Alternatively, naturally occurring residues can be divided into groups based on common side-chain properties: (1) hydrophobic: Norleucine, Met, Ala, Val, Leu, Ile; (2) neutral hydrophilic: Cys, Ser, Thr, Asn, Gln; (3) acidic: Asp, Glu; (4) basic: His, Lys, Arg; (5) residues that influence chain orientation: Gly, Pro; (6) aromatic: Trp, Tyr, Phe. Non-conservative substitutions will entail exchanging a member of one of these classes for another class. Particular conservative substitutions include, for example; Ala into Gly or into Ser; Arg into Lys; Asn into Gln or into His; Asp into Glu; Cys into Ser; Gln into Asn; Glu into Asp; Gly into Ala or into Pro; His into Asn or into Gln; Ile into Leu or into Val; Leu into Ile or into Val; Lys into Arg, into Gln or into Glu; Met into Leu, into Tyr or into Ile; Phe into Met, into Leu or into Tyr; Ser into Thr; Thr into Ser; Trp into Tyr; Tyr into Trp; and/or Phe into Val, into Ile or into Leu.

[0088] In the various embodiments described herein, it is further contemplated that variants (naturally occurring or otherwise), alleles, homologs, conservatively modified variants, and/or conservative substitution variants of any of the particular polypeptides described are encompassed. As to amino acid sequences, one of ordinary skill will recognize that individual substitutions, deletions or additions to a nucleic acid, peptide, polypeptide, or protein sequence which alters a single amino acid or a small percentage of amino acids in the encoded sequence is a “conservatively modified variant” where the alteration results in the substitution of an amino acid with a chemically similar amino acid and retains the desired activity of the polypeptide. Such conservatively modified variants are in addition to and do not exclude polymorphic variants, interspecies homologs, and alleles consistent with the disclosure. Indeed, it can be helpful in determining whether a given region of a polypeptide is likely to tolerate mutation, whether conservative or not, by alignment of the polypeptide's sequence from one species, e.g., human, with the sequence of one or more homologous polypeptides from other species, e.g., the sequences of the homologous polypeptide from one or more of rat, mouse, chicken, bovine, porcine or other species in order to determine which regions of the polypeptide molecule are more highly conserved than others throughout evolution. Indeed, it can also help, for a polypeptide connected to a process as centrally important as dATP production, to consider alignments with Rrm2 sequences from more distantly-related eukaryotes, such as fish, reptiles or others. Those regions more highly conserved are more likely to be important for function, meaning that if a ubiquitination site occurs in such region, care should be taken when choosing mutations to introduce so as not to overly interfere with enzymatic function. In such instances, it can be helpful to try several different conservative substitutions at a chosen site—if the change is not marked enough to interfere sufficiently with ubiquitination, no benefit would be expected for such mutant, but a more dramatic change is more likely to interfere with other function(s) of the polypeptide. On the other hand, if a ubiquitination site or ubiquitin-binding degron occurs in a less conserved region of the polypeptide, the polypeptide may well tolerate substitution with one or more non-conservative amino acids to interfere with ubiquitination, as well as tolerating conservative substitution(s).

[0089] In some embodiments, a polypeptide described herein (or a nucleic acid encoding such a polypeptide) can be a functional fragment of one of the polypeptides described herein, e.g., a functional fragment of an RRM2 polypeptide. As used herein, a “functional fragment” is a fragment or segment of a peptide which retains at least 50% of the wildtype reference polypeptide's activity according to an assay known in the art or described below herein. For example, a functional fragment described herein would retain at least 50% of the RRM2 function, e.g., can form a complex with Rrm1 and together catalyze the reaction(s) catalyzed by RNR. One skilled in the art can assess the function of an RRM2 enzyme using standard techniques, for example those described herein below. A functional fragment can comprise conservative substitutions of the sequences disclosed herein.

[0090] Conservative substitution variants can be obtained by mutations of native nucleotide sequences, for example. A “variant,” as referred to herein, is a polypeptide substantially homologous to a native or reference polypeptide, but which has an amino acid sequence different from that of the native or reference polypeptide because of one or a plurality of deletions, insertions or substitutions. Variant polypeptide-encoding DNA sequences encompass sequences that comprise one or more additions, deletions, or substitutions of nucleotides when compared to a native or reference DNA sequence, but that encode a variant protein or fragment thereof that retains activity of the non-variant polypeptide. A wide variety of PCR-based site-specific mutagenesis approaches are known in the art and can be applied by the ordinarily skilled artisan.

[0091] A variant amino acid or DNA sequence can be at least 90%, at least 91%, at least 92%, at least 93%, at least 94%, at least 95%, at least 96%, at least 97%, at least 98%, at least 99%, or more, identical to a native or reference sequence. The degree of homology (percent identity) between a native and a mutant or other reference (e.g., homologue, variant, etc.) sequence can be determined, for example, by comparing the two sequences using freely available computer programs commonly employed for this purpose on the world wide web (e.g. BLASTp or BLASTn with default settings).

[0092] Alterations of the native amino acid sequence can be accomplished by any of a number of techniques known to one of skill in the art. Mutations can be introduced, for example, at particular loci by synthesizing oligonucleotides containing a mutant sequence, flanked by restriction sites permitting ligation to fragments of the native sequence. Following ligation, the resulting reconstructed sequence encodes an analog having the desired amino acid insertion, substitution, or deletion. Alternatively, oligonucleotide-directed site-specific mutagenesis procedures can be employed to provide an altered nucleotide sequence having particular codons altered according to the substitution, deletion, or insertion required. Techniques for making such alterations are well established and include, for example, those disclosed by Walder et al. (Gene 42:133, 1986); Bauer et al. (Gene 37:73, 1985); Craik (BioTechniques, January 1985, 12-19); Smith et al. (Genetic Engineering: Principles and Methods, Plenum Press, 1981); and U.S. Pat. Nos. 4,518,584 and 4,737,462, which are herein incorporated by reference in their entireties. Any cysteine residue not involved in maintaining the proper conformation of a polypeptide also can be substituted, generally with serine, to improve the oxidative stability of the molecule and prevent aberrant crosslinking. Conversely, cysteine bond(s) can be added to a polypeptide to improve its stability or facilitate oligomerization.

[0093] The compositions and methods described herein comprise a first pharmaceutical composition comprising an RRM1 gene operably linked to a regulatory cassette. In another aspect, the compositions and methods described herein comprise a first pharmaceutical composition comprising an RRM1-encoding gene sequence and an RRM2-encoding gene sequence operably coupled to a first regulatory cassette. It is preferred, but not absolutely necessary, that the gene sequences encoding RRM1 and RRM2 are encoded on a single construct—this arrangement provides for closer management of the stoichiometry of the two subunits of the active enzyme complex. However, in another aspect, the methods and compositions can comprise a first pharmaceutical composition comprising an RRM1 gene operably coupled to a first regulatory cassette in a first delivery vehicle, and a second pharmaceutical composition comprising an RRM2 gene operably coupled to a second regulatory cassette in a second delivery vehicle. It is also contemplated that delivery of just the catalytic subunit of RNR can be overexpressed as a way to increase cellular dATP overall; in this approach, the overexpression of RRM2 can balance the natural degradation of naturally-encoded RRM2, thereby leading to a higher level of RNR activity overall.

[0094] In one embodiment of any of the aspects described herein, variant RRM1 and/or RRM2 polypeptides and/or RNR complex provided herein comprise the same enzymatic function of a wild-type RRM1 and/or RNR complex, for example, catalyzing the formation of deoxyribonucleotides from ribonucleotides. Assays for assessing the enzymatic function of a complex provided herein include, but are not limited to nucleotide binding assays, for example, as described in Chimploy, K., and Mathews, C K. J of Biol Chem, 2001; Hendricks, S P, and Mathews C K. J of Biol Chem, 1997; and Hendricks, S P, and Mathews C K. J of Biol Chem, 1998; see also the ribonucleotide reductase assay described by Jong et al., J. Biomed. Sci. 5: 62-68 (1998), the content of each of which are incorporated herein by reference in their entireties.

[0095] In another embodiment of any of the aspects, the RRM2 and RRM1-encoding nucleic acids are encoded on the same vector, delivery vehicle, and/or under the control of the same promoter.

[0096] In some embodiments of any of the aspects, the RRM1 or RRM2 comprises a mutation that prevents ubiquitination. Mutations found within the ubiquitin binding domain (i.e., the site of ubiquitin addition or ubiquitination) of RRM2 are shown, e.g., in U.S. Ser. No. 16/457,441 to decrease ubiquitination of RRM2, increase RRM2 stability (e.g., half-life of RRM2), and result in increased dATP in the cell. Accordingly, provided herein is an isolated nucleic acid molecule encoding an RRM2 polypeptide that, together with RRM1 polypeptide comprises ribonucleotide reductase activity, the encoded RRM2 polypeptide comprising a mutation that increases the intracellular level of the polypeptide as compared to wild-type RRM2 polypeptide. In one embodiment, the mutation is in a ubiquitin binding degron of RRM2. In another embodiment, the ubiquitin binding degrons of RRM2 are found at nucleotides 88-96 (which encode amino acids that can associate with the APC/FZR1 proteasome) and nucleotides 97-99 and 145-153 (which can associate with the SCF/CyclinF proteasome) of wild-type RRM2 (SEQ ID NO: 13). In another embodiment, the ubiquitin binding degrons of RRM2 are found at amino acids 30-32 (which can associate with the APC/FZR1 proteasome) and amino acids 33 and 49-51 (which can associate with the SCF/CyclinF proteasome) of wild-type RRM2 (SEQ ID NO: 13).

[0097] A mutation described herein can be an amino acid substitution, deletion, or insertion. It is contemplated herein that a mutation can be any amino acid change within the ubiquitin binding domain that results in at least decreased ubiquitination of RRM2, increased stability of RRM2, and/or increased dATP levels in the cell. Considerations for mutating a ubiquitination site while maintaining RRM2 activity in terms of complex formation and ribonucleotide reductase activity with RRM1 are discussed herein above. In some embodiments, the mutation is found near a ubiquitin binding degron, e.g., within 1-10 nucleotides of a ubiquitin binding degron, i.e., nucleotides not encoding a ubiquitin binding degron. In some embodiments, the mutation is found near a ubiquitin binding degron, e.g., within 1-10 amino acids of a ubiquitin binding degron, i.e., amino acids not encoding a ubiquitin binding degron.

[0098] Alterations of the native amino acid sequence (e.g., of RRM1 or RRM2) can be accomplished by any of a number of techniques known in the art. Mutations can be introduced, for example, at particular loci by synthesizing oligonucleotides containing a mutant sequence, flanked by restriction sites permitting ligation to fragments of the native sequence. Following ligation, the resulting reconstructed sequence encodes an analog having the desired amino acid insertion, substitution, or deletion. Alternatively, oligonucleotide-directed site-specific mutagenesis procedures can be employed to provide an altered nucleotide sequence having particular codons altered according to the substitution, deletion, or insertion required. Techniques for making such alterations are well established and include, for example, those disclosed by Walder et al. (Gene 42:133, 1986); Bauer et al. (Gene 37:73, 1985); Craik (BioTechniques, January 1985, 12-19); Smith et al. (Genetic Engineering: Principles and Methods, Plenum Press, 1981); and U.S. Pat. Nos. 4,518,584 and 4,737,462, which are herein incorporated by reference in their entireties. Assays for detecting the stability and/or degradation of a protein are known in the art, and include, treating a cell lysate or an in vitro system having the protein of interest and components of the ubiquitin mediated degradation system with cyclohexamide to halt protein translation and measuring the level of the protein of interest over time (e.g., in a time course) via Western blotting. Alternatively, protein stability can be measured using a standard pulse-chase experiment.

### Linkers

[0099] The RNR described herein are expressed as a fusion protein in which the RRM1 and RRM2 polypeptides are joined by a linker peptide. The constructs described herein can thus further comprise a linker. Linkers can be configured according to a specific need, e.g., to have a sufficient length and flexibility such that it can allow for a cleavage at a target site. Methods of synthesizing fusion proteins and linkers are known in the art.

[0100] In some embodiments of any of the aspects, the RRM2-encoding nucleic acid is linked to the RRM1-encoding nucleic acid, e.g., through a type 2A peptide-encoding sequence, such as P2A. P2A is a non-limiting example of a 2A self-cleaving peptide, which can induce the cleavage of the recombinant protein when expressed in a cell. See, e.g., Kolwicz et al., Molecular Therapy 24: 240-250 (2016), which is incorporated herein by reference in its entirety. Non-limiting examples of 2A self-cleaving peptides include T2A, P2A, E2A, and F2A. Any self-cleaving peptide sequence known in the art can be used to link RRM1 to RRM2.

SEQ ID NO: 25 is an exemplary nucleic acid
sequence comprising a Kozak sequence, RRM1, P2A,
and RRM2.
GCTAGCGAATTCGCCACCATGCACGTCATCAAGAGAGACGGGAGGCAGGA
AAGAGTCATGTTCGATAAAATCACTTCAAGAATCCAGAAACTGTGTTACG
GGCTGAACATGGACTTCGTCGATCCTGCCCAGATTACCATGAAAGTGATC
CAGGGACTGTACTCTGGCGTCACCACAGTGGAGCTGGACACACTGGCCGC
TGAAACCGCAGCCACACTGACTACCAAACACCCAGATTATGCAATTCTGG
CTGCACGGATCGCCGTGAGTAATCTGCATAAGGAGACAAAGAAAGTCTTC
TCAGACGTGATGGAGGACCTGTACAATTATATCAACCCTCACAATGGGAA
ACATTCACCAATGGTCGCTAAGAGCACTCTGGACATTGTGCTGGCCAACA
AAGATCGGCTGAACAGCGCTATCATCTACGACCGGGATTTCAGTTACAAC
TACTTCGGCTTTAAGACACTGGAGAGATCATATCTGCTGAAAATCAATGG
GAAGGTGGCCGAACGGCCTCAGCACATGCTGATGAGAGTCAGCGTGGGCA
TTCATAAGGAGGACATTGATGCCGCTATCGAAACTTACAACCTGCTGAGC
GAGCGCTGGTTCACCCACGCTTCCCCTACACTGTTTAACGCAGGAACCAA
TCGACCACAGCTGAGCAGCTGCTTCCTGCTGAGCATGAAGGACGATTCCA
TCGAGGGCATCTACGACACCCTGAAACAGTGCGCACTGATTTCTAAGAGT
GCCGGCGGGATCGGAGTCGCTGTGAGTTGTATTCGGGCAACCGGCTCATA
TATCGCCGGCACAAACGGCAACAGCAACGGGCTGGTCCCCATGCTGAGGG
TGTACAACAATACAGCCCGCTATGTGGATCAGGGAGGCAACAAGAGACCA
GGAGCATTTGCCATCTACCTGGAACCCTGGCACCTGGACATTTTCGAGTT
TCTGGATCTGAAGAAAAATACTGGCAAAGAGGAACAGAGGGCTCGCGACC
TGTTCTTTGCACTGTGGATTCCCGACCTGTTCATGAAGAGGGTGGAGACC
AACCAGGACTGGAGCCTGATGTGCCCCAATGAGTGTCCTGGGCTGGATGA
AGTGTGGGGAGAGGAATTTGAAAAACTGTACGCCAGTTATGAGAAGCAGG
GCCGAGTGCGGAAAGTGGTCAAGGCCCAGCAGCTGTGGTACGCTATCATT
GAGAGCCAGACAGAAACTGGCACCCCCTACATGCTGTATAAAGACTCTTG
CAACCGCAAGAGTAACCAGCAGAATCTGGGGACCATCAAATGCAGCAATC
TGTGTACAGAGATTGTGGAATATACTTCCAAGGATGAGGTCGCCGTGTGT
AACCTGGCATCACTGGCCCTGAATATGTACGTCACAAGCGAGCACACTTA
TGACTTCAAGAAACTGGCTGAAGTGACCAAAGTGGTCGTGAGGAATCTGA
ACAAGATCATTGACATCAACTACTATCCCGTGCCTGAGGCCTGCCTGAGC
AATAAGAGACATAGGCCCATCGGGATTGGAGTGCAGGGCCTGGCTGACGC
ATTCATCCTGATGCGCTACCCTTTTGAGTCCGCCGAAGCTCAGCTGCTGA
ACAAGCAGATTTTTGAAACAATCTACTACGGGGCTCTGGAGGCATCTTGT
GACCTGGCCAAAGAACAGGGACCCTACGAGACTTATGAAGGCTCCCCTGT
GTCTAAGGGCATCCTGCAGTACGATATGTGGAACGTCACACCAACTGACC
TGTGGGATTGGAAAGTGCTGAAGGAGAAAATTGCAAAGTATGGCATCCGG
AACAGCCTGCTGATCGCCCCAATGCCCACTGCCTCTACCGCTCAGATTCT
GGGCAACAATGAGTCCATCGAACCATACACTTCTAACATCTACACCCGGA
GAGTCCTGAGCGGGGAGTTCCAGATCGTGAATCCCCACCTGCTGAAAGAC
CTGACCGAACGGGGACTGTGGCATGAGGAAATGAAGAACCAGATCATTGC
CTGCAATGGCAGTATCCAGTCAATTCCTGAGATCCCAGACGATCTGAAAC
AGCTGTACAAGACAGTCTGGGAGATCAGCCAGAAAACTGTGCTGAAGATG
GCAGCCGAAAGAGGGGCTTTCATTGATCAGTCACAGAGCCTGAACATCCA
CATTGCCGAGCCCAATTACGGAAAGCTGACCTCCATGCATTTTTATGGGT
GGAAACAGGGACTGAAGACTGGCATGTACTATCTGCGCACCCGACCAGCT
GCAAACCCCATCCAGTTTACCCTGAATAAGGAGAAACTGAAGGACAAAGA
AAAGGTGTCCAAAGAGGAAGAGGAAAAGGAGAGAAACACAGCCGCTATGG
TGTGTTCTCTGGAGAATAGGGATGAATGCCTGATGTGTGGCAGTGGAAGC
GGAGCTACTAACTTCAGCCTGCTGAAGCAGGCTGGAGACGTGGAGGAGAA
CCCTGGACCTCTGAGTCTGAGGGTCCCACTGGCACCTATCACCGATCCAC
AGCAGCTGCAGCTGAGCCCACTGAAAGGCCTGAGTCTGGTCGATAAAGAG
AACACACCACCTGCACTGAGTGGCACTCGGGTGCTGGCATCAAAGACCGC
CCGGAGAATTTTCCAGGAGCCAACCGAACCCAAAACAAAGGCCGCTGCAC
CTGGGGTCGAGGACGAACCACTGCTGAGAGAGAATCCCAGGCGCTTCGTG
ATTTTTCCTATCGAATACCACGATATTTGGCAGATGTATAAGAAAGCTGA
GGCAAGTTTCTGGACAGCTGAGGAAGTGGACCTGAGCAAAGACATCCAGC
ACTGGGAATCCCTGAAGCCAGAGGAAAGGTACTTCATTTCTCATGTGCTG
GCATTCTTTGCCGCTAGTGACGGGATCGTGAACGAGAATCTGGTCGAACG
CTTTAGCCAGGAGGTGCAGATCACTGAAGCCCGATGCTTCTATGGATTTC
AGATTGCTATGGAGAACATCCATTCAGAAATGTACAGCCTGCTGATTGAC
ACCTATATCAAAGATCCTAAGGAGCGCGAGTTCCTGTTTAATGCCATTGA
GACAATGCCATGTGTGAAGAAAAAGGCAGACTGGGCTCTGCGATGGATCG
GCGATAAGGAGGCTACTTACGGGGAAAGAGTGGTCGCATTCGCAGCCGTG
GAGGGAATTTTCTTTTCTGGCAGTTTCGCTTCCATCTTTTGGCTGAAAAA
GCGAGGCCTGATGCCTGGGCTGACCTTTTCCAACGAGCTGATTTCTCGCG
ACGAAGGCCTGCACTGCGATTTCGCCTGTCTGATGTTTAAACACCTGGTG
CATAAGCCCTCTGAGGAACGAGTCCGGGAGATCATTATCAACGCAGTGAG
GATCGAGCAGGAGTTCCTGACAGAAGCCCTGCCTGTCAAACTGATTGGCA
TGAATTGCACTCTGATGAAGCAGTACATCGAGTTTGTGGCCGACAGGCTG
ATGCTGGAACTGGGATTCTCAAAGGTGTTTCGCGTCGAGAACCCATTCGA
TTTTATGGAGAATATCAGCCTGGAAGGCAAAACAAACTTCTTTGAGAAGA
GAGTCGGGGAATATCAGAGGATGGGCGTGATGAGCAGCCCCACTGAGAAT
AGCTTCACCCTGGACGCCGATTTTTGAGCTAGC
SEQ ID NO: 26 is an exemplary Kozak sequence (as
found in SEQ ID NO: 25).
GCCACC
SEQ ID NO: 27 is an exemplary RRM1 sequence (as
found in SEQ ID NO: 25).
ATGCACGTCATCAAGAGAGACGGGAGGCAGGAAAGAGTCATGTTCGATAA
AATCACTTCAAGAATCCAGAAACTGTGTTACGGGCTGAACATGGACTTCG
TCGATCCTGCCCAGATTACCATGAAAGTGATCCAGGGACTGTACTCTGGC
GTCACCACAGTGGAGCTGGACACACTGGCCGCTGAAACCGCAGCCACACT
GACTACCAAACACCCAGATTATGCAATTCTGGCTGCACGGATCGCCGTGA
GTAATCTGCATAAGGAGACAAAGAAAGTCTTCTCAGACGTGATGGAGGAC
CTGTACAATTATATCAACCCTCACAATGGGAAACATTCACCAATGGTCGC
TAAGAGCACTCTGGACATTGTGCTGGCCAACAAAGATCGGCTGAACAGCG
CTATCATCTACGACCGGGATTTCAGTTACAACTACTTCGGCTTTAAGACA
CTGGAGAGATCATATCTGCTGAAAATCAATGGGAAGGTGGCCGAACGGCC
TCAGCACATGCTGATGAGAGTCAGCGTGGGCATTCATAAGGAGGACATTG
ATGCCGCTATCGAAACTTACAACCTGCTGAGCGAGCGCTGGTTCACCCAC
GCTTCCCCTACACTGTTTAACGCAGGAACCAATCGACCACAGCTGAGCAG
CTGCTTCCTGCTGAGCATGAAGGACGATTCCATCGAGGGCATCTACGACA
CCCTGAAACAGTGCGCACTGATTTCTAAGAGTGCCGGCGGGATCGGAGTC
GCTGTGAGTTGTATTCGGGCAACCGGCTCATATATCGCCGGCACAAACGG
CAACAGCAACGGGCTGGTCCCCATGCTGAGGGTGTACAACAATACAGCCC
GCTATGTGGATCAGGGAGGCAACAAGAGACCAGGAGCATTTGCCATCTAC
CTGGAACCCTGGCACCTGGACATTTTCGAGTTTCTGGATCTGAAGAAAAA
TACTGGCAAAGAGGAACAGAGGGCTCGCGACCTGTTCTTTGCACTGTGGA
TTCCCGACCTGTTCATGAAGAGGGTGGAGACCAACCAGGACTGGAGCCTG
ATGTGCCCCAATGAGTGTCCTGGGCTGGATGAAGTGTGGGGAGAGGAATT
TGAAAAACTGTACGCCAGTTATGAGAAGCAGGGCCGAGTGCGGAAAGTGG
TCAAGGCCCAGCAGCTGTGGTACGCTATCATTGAGAGCCAGACAGAAACT
GGCACCCCCTACATGCTGTATAAAGACTCTTGCAACCGCAAGAGTAACCA
GCAGAATCTGGGGACCATCAAATGCAGCAATCTGTGTACAGAGATTGTGG
AATATACTTCCAAGGATGAGGTCGCCGTGTGTAACCTGGCATCACTGGCC
CTGAATATGTACGTCACAAGCGAGCACACTTATGACTTCAAGAAACTGGC
TGAAGTGACCAAAGTGGTCGTGAGGAATCTGAACAAGATCATTGACATCA
ACTACTATCCCGTGCCTGAGGCCTGCCTGAGCAATAAGAGACATAGGCCC
ATCGGGATTGGAGTGCAGGGCCTGGCTGACGCATTCATCCTGATGCGCTA
CCCTTTTGAGTCCGCCGAAGCTCAGCTGCTGAACAAGCAGATTTTTGAAA
CAATCTACTACGGGGCTCTGGAGGCATCTTGTGACCTGGCCAAAGAACAG
GGACCCTACGAGACTTATGAAGGCTCCCCTGTGTCTAAGGGCATCCTGCA
GTACGATATGTGGAACGTCACACCAACTGACCTGTGGGATTGGAAAGTGC
TGAAGGAGAAAATTGCAAAGTATGGCATCCGGAACAGCCTGCTGATCGCC
CCAATGCCCACTGCCTCTACCGCTCAGATTCTGGGCAACAATGAGTCCAT
CGAACCATACACTTCTAACATCTACACCCGGAGAGTCCTGAGCGGGGAGT
TCCAGATCGTGAATCCCCACCTGCTGAAAGACCTGACCGAACGGGGACTG
TGGCATGAGGAAATGAAGAACCAGATCATTGCCTGCAATGGCAGTATCCA
GTCAATTCCTGAGATCCCAGACGATCTGAAACAGCTGTACAAGACAGTCT
GGGAGATCAGCCAGAAAACTGTGCTGAAGATGGCAGCCGAAAGAGGGGCT
TTCATTGATCAGTCACAGAGCCTGAACATCCACATTGCCGAGCCCAATTA
CGGAAAGCTGACCTCCATGCATTTTTATGGGTGGAAACAGGGACTGAAGA
CTGGCATGTACTATCTGCGCACCCGACCAGCTGCAAACCCCATCCAGTTT
ACCCTGAATAAGGAGAAACTGAAGGACAAAGAAAAGGTGTCCAAAGAGGA
AGAGGAAAAGGAGAGAAACACAGCCGCTATGGTGTGTTCTCTGGAGAATA
GGGATGAATGCCTGATGTGTGGCAGT
SEQ ID NO: 28 is an exemplary P2A sequence (as
found in SEQ ID NO: 25).
GCTACTAACTTCAGCCTGCTGAAGCAGGCTGGAGACGTGGAGGAGAACCC
TGGACCT

### Regulatory Cassettes

[0101] The RRM1, RRM2 and/or micro-dystrophin-coding sequences for the constructs described herein can be operably coupled to a regulatory cassette.

[0102] A regulatory cassette directs the expression of a gene (e.g., RRM1, RRM2, μDys). A regulatory cassette generally comprises a promoter element and other sequences necessary to direct the assembly of an active transcriptase complex in a desired cell type. A regulatory cassette can also include, for example, a 3′ untranslated sequence including a polyadenylation signal downstream of the region where an open reading frame encoding the desired polypeptide is or can be inserted. Exemplary promoters that can be used include, but are not limited to, constitutive promoters, repressible promoters, and/or inducible promoters, some non-limiting examples of which include viral promoters (e.g., CMV, SV40), tissue specific promoters (e.g., striated muscle CK8), cardiac muscle (e.g., cTnT), eye (e.g., MSK) and synthetic promoters (SP1 elements) and the chicken beta actin promoter (CB or CBA).

[0103] In some embodiments, the regulatory cassette can be positioned at the 5′ end of the RRM1, RRM2, or the micro-dystrophin described herein. In others, the cassette flanks the sequence to be encoded.

[0104] In some embodiments of any of the aspects, the regulatory cassette is a muscle-specific regulatory cassette. Exemplary muscle-specific regulatory cassettes include, but are not limited to, a cardiac troponin T (cTNT) regulatory cassette; a creatine kinase regulatory cassette; a muscle creatine kinase (MCK) regulatory cassette; a CK8 regulatory cassette; a MHCK7 regulatory cassette; CK7 regulatory cassette; and any fragment or combinations thereof. The nucleic acid constructs described herein can be prepared by synthetic and/or cloning methods known in the art.

[0105] In some embodiments of any of the aspects, the pharmaceutical compositions described herein includes a CK8 regulatory cassette. In some embodiments, the CK8 regulatory cassette has at least 80% sequence identity to the nucleic acid sequence of SEQ ID NO: 29.

| CK8 promoter (SEQ ID NO: 29): | |
|---|---|
| ctagactagc atgctgccca tgtaaggagg caaggcctgg ggacacccga gatgcctggt | 60 |
| tataattaac ccagacatgt ggctgccccc ccccccccaa cacctgctgc ctctaaaaat | 120 |
| aaccctgcat gccatgttcc cggcgaaggg ccagctgtcc cccgccagct agactcagca | 180 |
| cttagtttag gaaccagtga gcaagtcagc ccttggggca gcccatacaa ggccatgggg | 240 |
| ctgggcaagc tgcacgcctg ggtccggggt gggcacggtg cccgggcaac gagctgaaag | 300 |
| ctcatctgct ctcaggggcc cctccctggg gacagcccct cctggctagt cacaccctgt | 360 |
| aggctcctct atataaccca ggggcacagg ggctgccctc attctaccac cacctccaca | 420 |
| gcacagacag acactcagga gccagccagc | 450 |

[0106] The CK8 regulatory cassette can display strong, muscle-restricted expression. The CK8 regulatory cassette is less than 500 bps in size (see, e.g., Goncalves, M. A., et al., Molecular Therapy: The Journal of the American Society of Gene Therapy 19, 1331-1341, (2011) and Martari, M., et al., Human Gene Therapy 20, 759-766, (2009), which are incorporated herein by reference in its entirety.

[0107] In some embodiments of any of the aspects, the pharmaceutical compositions described herein includes a cTNT regulator cassette. In some embodiments, the cTNT regulatory cassette has at least 80% sequence identity to the nucleic acid sequence of SEQ ID NO: 30.

| hum-cTnT455 (SEQ ID NO: 30): | |
|---|---|
| ctgctcccag ctggccctcc caggcctggg ttgctggcct ctgctttatc aggattctca | 60 |
| agagggacag ctggtttatg ttgcatgact gttccctgca tatctgctct ggttttaaat | 120 |
| agcttatctg ctagcctgct cccagctggc cctcccaggc ctgggttgct ggcctctgct | 180 |
| ttatcaggat tctcaagagg gacagctggt ttatgttgca tgactgttcc ctgcatatct | 240 |
| gctctggttt taaatagctt atctgagcag ctggaggacc acatgggctt atatggggca | 300 |
| cctgccaaaa tagcagccaa cacccccccc tgtcgcacat tcctccctgg ctcaccaggc | 360 |
| cccagcccac atgcctgctt aaagccctct ccatcctctg cctcacccag tccccgctga | 420 |
| gactgagcag acgcctccag gatctgtcgg cagct | 455 |

[0108] The human cTnT455 regulatory cassette (SEQ ID NO: 30) targets the transient expression of the pharmaceutical composition in wounded and/or regenerating cardiac muscle. cTnT455 can lead to high expression in the heart but little to no expression in other tissue. In some embodiments, expression of the pharmaceutical compositions disclosed herein prevents the loss of cardiac muscle and/or of cardiomyocytes. In some embodiments, expression of the pharmaceutical compositions disclosed herein regenerate skeletal muscle. In some embodiments, expression of the pharmaceutical compositions disclosed herein prevent muscle cell necrosis and/or wasting of skeletal muscle.

### Delivery Vehicles

[0109] The methods and compositions described herein involve the introduction of sequences encoding therapeutic polypeptides to muscle cells in vivo, including, for example, cardiac muscle cells, among others. These methods permit practitioners to introduce DNA coding for a therapeutic polypeptide directly into a patient or subject (in vivo gene therapy) or into cells isolated from a patient, a subject, or a donor (ex vivo gene therapy). The introduced DNA then directs the patient's or subject's own cells or grafted cells to produce the desired protein product. Gene therapy can also permit practitioners to select specific organs or cellular targets (e.g., muscle, liver, blood cells, brain cells, etc.) for therapy. Sequences to be introduced to cells in vivo (or ex vivo, for that matter) can be cloned into an appropriate vector. Examples of mammalian expression vectors include pCDM8 (Seed, 1987. Nature 329: 840) and pMT2PC (Kaufman, et al., 1987. EMBO J. 6: 187-195), and are further described in, e.g., U.S. Pat. Nos. 8,187,836; 8,455,219; 8,980,626; 7,384,776; and 6,451,539; the contents of which are incorporated herein by reference in their entireties. When used in mammalian cells, the expression vector's control functions are typically provided by one or more regulatory elements. For example, commonly used promoters are derived from polyoma, adenovirus 2, cytomegalovirus, simian virus 40, and others disclosed herein and known in the art. For other suitable expression systems for both prokaryotic and eukaryotic cells see, e.g., Chapters 16 and 17 of Sambrook, et al., MOLECULAR CLONING: A LABORATORY MANUAL. 2nd ed., Cold Spring Harbor Laboratory, Cold Spring Harbor Laboratory Press, Cold Spring Harbor, N.Y., 1989; and Muller, D., et al. (2006) Microbial Cell Factories.

[0110] In some embodiments, the recombinant mammalian expression vector is capable of directing expression of the synthetic nucleic acid preferentially in a particular cell type (e.g., tissue-specific regulatory elements are used to express the nucleic acid in, for example, a cardiomyocyte). Tissue-specific regulatory elements are known in the art. Non-limiting examples of suitable cardiac tissue-specific promoters include the cTnT promoter, the NCX1 promoter (e.g., as described in Nicholas S B., et al. Am J Physiol. 1998), the MLC-2v (e.g., as described Griscelli, F., et al. C R Acad Sci III. 1997 February; 320(2):103-12); and the cardiac troponin-I proximal promoter (TNNI3) (e.g., as described in Gallo, P., et al. Gene Therapy. 15, pages 161-170 (2008). All citations provided herein are incorporated herein by reference in their entireties. The CK8 promoter described elsewhere herein is an example of a striated muscle-specific promoter.

[0111] The RRM1 and RRM2 constructs described herein can be administered to a subject in need in one vector, or in two vectors or delivery vehicles. In some embodiments of any of the aspects, a first delivery vehicle and a second delivery vehicle are separate delivery vehicles. In some embodiments of any of the aspects, the delivery vehicle is a viral vector.

[0112] Current viral-mediated gene delivery methods include, but are not limited to, retrovirus, adenovirus, herpes virus, pox virus, and adeno-associated virus (AAV) vectors.

### AAV Vectors

[0113] AAV is a parvovirus which belongs to the genus Dependoparvovirus. AAV has several attractive features not found in other viruses. First, AAV can infect a wide range of host cells, including non-dividing cells. Second, AAV can infect cells from different species. Third, AAV has not been associated with any human or animal disease and does not appear to alter the biological properties of the host cell upon integration. Indeed, it is estimated that 80-85% of the human population has been exposed to the virus. Finally, AAV is stable at a wide range of physical and chemical conditions which lends itself to production, storage, and transportation requirements.

[0114] The AAV genome is a linear, single-stranded DNA molecule containing 4681 nucleotides. The AAV genome generally comprises an internal non-repeating genome flanked on each end by inverted terminal repeats (ITRs). The ITRs are approximately 145 base pairs (bp) in length. The ITRs have multiple functions, including as origins of DNA replication and as packaging signals for the viral genome.

[0115] The internal non-repeated portion of the genome includes two large open reading frames, known as the AAV replication (rep) and capsid (cap) genes. The rep and cap genes code for viral proteins that allow the virus to replicate and package the viral genome into a virion. In particular, a family of at least four viral proteins are expressed from the AAV rep region, Rep78, Rep68, Rep52, and Rep40, named according to their apparent molecular weight. The AAV cap region encodes at least three proteins, VP1, VP2, and VP3.

[0116] AAV is a helper-dependent virus; that is, it requires co-infection with a helper virus (e.g., adenovirus, herpesvirus, or vaccinia) in order to form AAV virions. In the absence of co-infection with a helper virus, AAV establishes a latent state in which the viral genome inserts into a host cell chromosome, but infectious virions are not produced. Subsequent infection by a helper virus “rescues” the integrated genome, allowing it to replicate and package its genome into infectious AAV virions. While AAV can infect cells from different species, the helper virus must be of the same species as the host cell. Thus, for example, human AAV will replicate in canine cells co-infected with a canine adenovirus.

[0117] An “AAV vector” comprises a vector derived from an adeno-associated virus serotype, including without limitation, AAV1, AAV2, AAV3, AAV4, AAV5, AAV6, AAV7, AAV8, and AAV9. AAV vectors can have one or more of the AAV wild-type genes deleted in whole or part, e.g., the rep and/or cap genes, but retain functional flanking ITR sequences. Functional ITR sequences are necessary for the rescue, replication, and packaging of the AAV virion. Thus, an AAV vector is defined herein to include at least those sequences required in cis for replication and packaging (e.g., functional ITRs) of the virus. The ITRs need not be the wild-type nucleotide sequences, and may be altered, e.g., by the insertion, deletion or substitution of nucleotides, so long as the sequences provide for functional rescue, replication and packaging.

[0118] A “recombinant AAV vector” or “rAAV vector” comprises an infectious, replication-defective virus composed of an AAV protein shell encapsulating a heterologous nucleotide sequence of interest that is flanked on both sides by AAV ITRs. An rAAV vector is produced in a suitable host cell comprising an AAV vector, AAV helper functions, and accessory functions. In this manner, the host cell is rendered capable of encoding AAV polypeptides that are required for packaging the AAV vector (containing a recombinant nucleotide sequence of interest) into infectious recombinant virion particles for subsequent gene delivery.

[0119] In various embodiments, the delivery vehicle may comprise an adeno-associated virus (AAV) vector or a recombinant adeno-associated virus (rAAV) vector. The AAV vector may be a serotype 6 AAV (AAV6). Likewise, the rAAV vector may be a serotype 6 rAAV (rAAV6). The AAV vector may be a serotype 8 AAV (AAV8). Likewise, the rAAV vector may be a serotype 8 rAAV (rAAV8). The AAV vector may be a serotype 9 AAV (AAV9). Likewise, the rAAV vector may be a serotype 9 rAAV (rAAV9). The rAAV vector may be comprised of AAV2 genomic inverted terminal repeat (ITR) sequences pseudotyped with capsid proteins derived from AAV serotype 6 (rAAV2/6). Other suitable serotypes of the AAV or rAAV known in the art can be used. AAV6 is particularly attractive due to efficient infection and transduction of muscle cells, including cardiac muscle cells.

### Pharmaceutical Compositions

[0120] One aspect provided herein is a pharmaceutical composition comprising, consisting of, or consisting essentially of any of the isolated nucleic acids, vectors, polypeptides, or RNR complexes described herein. As used herein, the term “pharmaceutical composition” refers to the active agent in combination with a pharmaceutically acceptable carrier e.g., a carrier commonly used in the pharmaceutical industry.

[0121] For clinical use of the methods and compositions described herein, administration of the RRM1, RRM2, and/or micro-dystrophin constructs described herein can include formulation into pharmaceutical compositions or pharmaceutical formulations for parenteral administration, e.g., intravenous; muscular e.g., intramuscular or intracardiac delivery; or other mode of administration. In some embodiments, the nucleic acid compositions described herein can be administered along with any pharmaceutically acceptable carrier compound, material, or composition which results in an effective treatment in the subject. Thus, a pharmaceutical formulation for use in the methods described herein can contain the RRM1 and/or RRM2 genes in combination with one or more pharmaceutically acceptable ingredients. The phrase “pharmaceutically acceptable” refers to those compounds, materials, compositions, and/or dosage forms which are, within the scope of sound medical judgment, suitable for use in contact with the tissues of human beings and animals without excessive toxicity, irritation, allergic response, or other problem or complication, commensurate with a reasonable benefit/risk ratio. The phrase “pharmaceutically acceptable carrier” as used herein means a pharmaceutically acceptable material, composition or vehicle, such as a liquid or solid filler, diluent, excipient, solvent, media, encapsulating material, or solvent encapsulating material, involved in maintaining the stability, solubility, or activity of, a nucleic acid or viral vector construct as described herein. Each carrier must be “acceptable” in the sense of being compatible with the other ingredients of the formulation and not injurious to the patient. The terms “excipient,” “carrier,” “pharmaceutically acceptable carrier” or the like are used interchangeably herein.

[0122] Suitable excipients are, for example, water, saline, dextrose, glycerol, ethanol or the like and combinations thereof. In addition, if desired, the composition can contain minor amounts of auxiliary substances such as pH buffering agents and the like which enhance the effectiveness of the active ingredient. The therapeutic composition of the present technology can include pharmaceutically acceptable salts of the components therein. Pharmaceutically acceptable salts include the acid addition salts (formed with the free amino groups of the polypeptide) that are formed with inorganic acids such as, for example, hydrochloric or phosphoric acids, or such organic acids as acetic, tartaric, mandelic and the like. Salts formed with the free carboxyl groups can also be derived from inorganic bases such as, for example, sodium, potassium, ammonium, calcium or ferric hydroxides, and such organic bases as isopropylamine, trimethylamine, 2-ethylamino ethanol, histidine, procaine and the like. Physiologically tolerable carriers are well known in the art. Exemplary liquid carriers are sterile aqueous solutions that contain no materials in addition to the active ingredients and water, or contain a buffer such as sodium phosphate at physiological pH value, physiological saline or both, such as phosphate-buffered saline. Still further, aqueous carriers can contain more than one buffer salt, as well as salts such as sodium and potassium chlorides, dextrose, polyethylene glycol and other solutes. Liquid compositions can also contain liquid phases in addition to and to the exclusion of water. Exemplary of such additional liquid phases are glycerin, vegetable oils such as cottonseed oil, and water-oil emulsions. The amount of an active agent used with the methods described herein that will be effective in the treatment of a particular disorder or condition will depend on the nature of the disorder or condition, and can be determined by standard clinical techniques.

[0123] Therapeutic pharmaceutical compositions described herein can also contain more than one active compound as necessary for the particular indication being treated, preferably those with complementary activities that do not adversely affect each other.

### Administration, Dosage, and Efficacy

[0124] The RNR constructs and pharmaceutical compositions described herein can be formulated, dosed, and administered in a fashion consistent with good medical practice. Factors for consideration in this context include the particular muscular dystrophy or complication being treated, the particular subject being treated, the clinical condition of the individual subject, the cause of the disorder, the site of delivery of the pharmaceutical composition, the method of administration, the scheduling of administration, and other factors known to medical practitioners.

[0125] The therapeutic formulations to be used for in vivo administration, such as parenteral administration, in the methods described herein can be sterile, which is readily accomplished by filtration through sterile filtration membranes, or other methods known to those of skill in the art.

[0126] The RNR construct described herein and pharmaceutical compositions thereof can be administered to a subject in need thereof by any appropriate route which results in an effective treatment in the subject. As used herein, the terms “administering,” and “introducing” are used interchangeably and refer to the placement of a pharmaceutical composition, RRM1, RRM2, RNR, and/or micro-dystrophin construct, into a subject by a method or route which results in at least partial localization of such pharmaceutical compositions at a desired site, such that a desired effect(s) is produced. A pharmaceutical composition can be administered to a subject by any mode of administration that delivers the nucleic acid constructs systemically or to a desired surface or target, and can include, but is not limited to, injection, infusion, instillation, and inhalation administration. To the extent that RRM1, RRM2, and/or micro-dystrophin constructs described herein can be protected from inactivation in the gut, oral administration forms are also contemplated. “Injection” includes, without limitation, intravenous, intramuscular, intra-arterial, intrathecal, intraventricular, intracapsular, intraorbital, intracardiac, intradermal, intraperitoneal, transtracheal, subcutaneous, subcuticular, intraarticular, sub capsular, subarachnoid, intraspinal, intracerebro spinal, and intrasternal injection and infusion.

[0127] The phrases “parenteral administration” and “administered parenterally” as used herein, refer to modes of administration other than enteral and topical administration, usually by injection. The phrases “systemic administration,” “administered systemically”, “peripheral administration” and “administered peripherally” as used herein refer to the administration of a therapeutic agent other than directly into a target site, tissue, or organ, such as a site of cardiac dysfunction, such that it enters the subject's circulatory system and, thus, is subject to metabolism and other like processes. In other embodiments, the pharmaceutical composition is administered locally, e.g., by direct injections, and the injections can be repeated periodically.

[0128] In some embodiments, the compositions described herein are administered by intravenous injection, orally, intracardiac delivery, or intramuscular injection.

[0129] The term “effective amount” as used herein refers to the amount of a pharmaceutical composition needed to alleviate or prevent at least one or more symptoms of a muscular dystrophy, disease or disorder, and relates to a sufficient amount of pharmacological composition to provide the desired effect, e.g., increase cardiac output, reduce cardiomyopathy, reduce pathology, or any symptom associated with or caused by the loss of dystrophin. The term “therapeutically effective amount” therefore refers to an amount of a pharmaceutical composition described herein using the methods as disclosed herein, that is sufficient to effect a particular effect when administered to a typical subject. An effective amount as used herein would also include an amount sufficient to delay the development of a symptom of the disease, alter the course of a symptom disease (for example, but not limited to, slow the progression of a symptom of the disease), or reverse a symptom of the disease. Thus, it is not possible to specify the exact “effective amount.” However, for any given case, an appropriate “effective amount” can be determined by one of ordinary skill in the art using only routine experimentation.

[0130] Effective amounts, toxicity, and therapeutic efficacy can be determined by standard pharmaceutical procedures in cell cultures or experimental animals, e.g., for determining the LD50 (the dose lethal to 50% of the population) and the ED50 (the dose therapeutically effective in 50% of the population). The dosage can vary depending upon the dosage form employed and the route of administration utilized. The dose ratio between toxic and therapeutic effects is the therapeutic index and can be expressed as the ratio LD50/ED50. Compositions and methods that exhibit large therapeutic indices are preferred. A therapeutically effective dose can be estimated initially from cell culture assays. Also, a dose can be formulated in animal models to achieve a circulating plasma concentration range that includes the IC50 (i.e., the concentration of the RRM1, RRM2, or a combination thereof), which achieves a half-maximal inhibition of symptoms) as determined in cell culture, or in an appropriate animal model. Levels in plasma can be measured, for example, by high performance liquid chromatography. The effects of any particular dosage can be monitored by a suitable bioassay. The dosage can be determined by a physician and adjusted, as necessary, to suit observed effects of the treatment.

[0131] The pharmaceutical compositions described herein can be formulated, in some embodiments, with one or more additional therapeutic agents currently used to prevent or treat muscular dystrophy, for example. The effective amount of such other agents depends on the amount of the nucleic acid constructs in the formulation, the type of disorder or treatment, and other factors discussed above. These are generally used in the same dosages and with administration routes as used herein before or about from 1 to 99% of the heretofore employed dosages.

[0132] The dosage ranges for the pharmaceutical compositions described herein depend upon the potency, and encompass amounts large enough to produce the desired effect. The dosage should not be so large as to cause unacceptable adverse side effects. Generally, the dosage will vary with the age, condition, and sex of the patient and can be determined by one of skill in the art. The dosage can also be adjusted by the individual physician in the event of any complication. In some embodiments, the dosage ranges from 0.001 mg/kg body weight to 100 mg/kg body weight. In some embodiments, the dose range is from 5 μg/kg body weight to 100 μg/kg body weight. Alternatively, the dose range can be titrated to maintain serum levels between 1 μg/mL and 1000 μg/mL. For systemic administration, subjects can be administered a therapeutic amount, such as, e.g., 0.1 mg/kg, 0.5 mg/kg, 1.0 mg/kg, 2.0 mg/kg, 2.5 mg/kg, 5 mg/kg, 7.5 mg/kg, 10 mg/kg, 15 mg/kg, 20 mg/kg, 25 mg/kg, 30 mg/kg, 40 mg/kg, 50 mg/kg, or more. Dosages of viral vectors can also be expressed as numbers of viral genomes (vg) per kilogram. These doses can be administered by one or more separate administrations, or by continuous infusion. For repeated administrations over several days or longer, depending on the condition, the treatment is sustained until, for example, the muscular dystrophy is treated, as measured by the methods described above or known in the art. However, other dosage regimens can be useful.

[0133] While a goal of gene therapy is generally to introduce a therapeutic construct or sequence once or a limited number of times to effect a durable treatment, the duration of a therapy using the methods described herein can continue for as long as medically indicated or until a desired therapeutic effect (e.g., those described herein) is achieved. As will be appreciated by one of skill in the art, appropriate dosing regimens for a given composition can comprise a single administration or multiple ones. In certain embodiments, the administration of a pharmaceutical composition as described herein can be repeated, e.g., monthly, quarterly, biannually, yearly or over a more distantly separated period, depending upon duration of therapeutic effect.

[0134] The precise dose to be employed in a formulation will also depend on the route of administration and should be decided according to the judgment of the practitioner and each patient's circumstances. Ultimately, the practitioner or physician will decide the amount of the RNR, RRM1, RRM2, or mDys constructs or vectors to administer and how often to administer them based on desired effect and measured efficacies.

[0135] In some embodiments of these methods and all such methods described herein, the pharmaceutical compositions described herein are administered in an amount effective to provide cardioprotection, improve cardiac function, treat or prevent muscular dystrophy or complications thereof, and/or alleviate at least one symptom of a muscular dystrophy.

[0136] “Alleviating a symptom of a muscular dystrophy” is ameliorating any condition or symptom associated with the muscular dystrophy, e.g., cardiac dysfunction. Alternatively, alleviating a symptom of a muscular dystrophy can involve increasing contractile function, increasing systolic function, and/or increasing diastolic function in the subject relative to an untreated control. As compared with an equivalent untreated control, such reduction or degree of prevention is at least 5%, 10%, 20%, 40%, 50%, 60%, 80%, 90%, 95%, or 100% as measured by any standard technique.

[0137] The effects of the RNR pharmaceutical compositions described herein can be determined, for example, by detecting and measuring cardiac function in a subject, a test animal, or cell.

[0138] Methods for detecting, measuring, and determining cardiac function are known in the art. Non-limiting examples of clinical tests that can be used to assess cardiac functional parameters include echocardiography (with or without Doppler flow imaging), electrocardiogram (EKG), exercise stress test, Holter monitoring, or measurement of natriuretic peptide (e.g., atrial natriuretic peptide).

[0139] Where necessary or desired, animal models of muscular dystrophy can be used to gauge the effectiveness of a particular composition as described herein. For example, an mdx mouse model, or DMD canines can be used. Animal models of cardiac function are useful for monitoring infarct zones, coronary perfusion, electrical conduction, left ventricular end diastolic pressure, left ventricular ejection fraction, heart rate, blood pressure, degree of hypertrophy, diastolic relaxation function, cardiac output, heart rate variability, and ventricular wall thickness, etc.

[0140] In other embodiments, the nucleic acid constructs described herein may be used to treat a muscular dystrophy or a complication thereof, or improve survival, e.g., to reduce the onset, incidence of severity of a cardiovascular event. The efficacy of a therapeutic treatment can be assessed by the presence or absence of a symptom of a disease by functional output (e.g., measuring cardiac output or renal function), markers, levels or expression (e.g., serum levels of cardiac enzymes, markers of ischemia, renal function or insufficiency), and/or echocardiographic and electrographic means (e.g., an electrocardiogram or an echocardiogram). Further, as will be appreciated by a skilled physician, the ability to modify the nucleic acid constructs described herein can permit them to customize a treatment based on a subject's particular set of symptoms and/or severity of disease and further to minimize side effects or toxicity.

[0141] A patient who is being treated for a muscular dystrophy can be one whom a medical practitioner has diagnosed as having such a condition. Diagnosis can be by any suitable means. Diagnosis and monitoring can involve, for example, detecting the level of dystrophin in a biological sample (for example, a tissue biopsy, blood test, or urine test), detecting the level of creatine kinase (CK) in a biological sample, detecting symptoms associated with muscular dystrophy, or detecting the electrical activity of a muscle via electromyography (EMG) or an electrocardiogram (EKG). Genetic sequencing can also provide an indication of a mutation in one or more sequences involved in or linked to a congenital muscular dystrophy, including but not limited to a mutation that affects the structure or expression level of dystrophin. A patient in whom the development of a muscular dystrophy is being prevented may or may not have received a diagnosis of a muscular dystrophy. One of ordinary skill in the art will understand that these patients may have been subjected to the same standard tests as described above or may have been identified, without examination, as one at high risk due to the presence of one or more risk factors (such as family history of a muscular dystrophy).

[0142] All patents and other publications identified are expressly incorporated herein by reference for the purpose of describing and disclosing, for example, the methodologies described in such publications that might be used in connection with the present disclosure. These publications are provided solely for their disclosure prior to the filing date of the present application. Nothing in this regard should be construed as an admission that the inventors are not entitled to antedate such disclosure by virtue of prior disclosure or for any other reason. All statements as to the date or representation as to the contents of these documents are based on the information available to the applicants and do not constitute any admission as to the correctness of the dates or contents of these documents.

[0143] It should be understood that this disclosure is not limited to the particular methodology, protocols, and reagents, etc., provided herein and as such may vary. The terminology used herein is for the purpose of describing particular embodiments only, and is not intended to limit the scope of the present disclosure, which is defined solely by the claims. The invention is further illustrated by the following example, which should not be construed as further limiting.

### EXAMPLES

[0144] The following examples are illustrative of disclosed methods and compositions. In light of this disclosure, those of ordinary skill in the art will recognize that variations of these examples and other examples of the disclosed methods and compositions would be possible without undue experimentation.

### Example 1: Methods

### 1. Animal Experiments

[0145] Male wild-type C57Bl/6J (The Jackson Laboratory, Bar Harbor, Me.) and mdx^{4cv} (generated in house) mice were utilized for these studies (17). All animals were experimentally manipulated in accordance with the Institutional Animal Care and Use Committee (IACUC) of the University of Washington. Experimental mice were administered vector at 22-24 months of age via the retro-orbital sinus with a 200-μl bolus injection in Hanks Balanced Saline Solution (HBSS) at a dose of 2×10¹⁴ vg/kg. All mice were housed in a specific-pathogen free animal care facility using a 12-hr light/12-hr dark cycle with access to food and water ad libitum.

### 2. Vector Production

[0146] Recombinant AAV genomes containing the CK8 regulatory cassette (expressed exclusively in skeletal and cardiac muscle) and the human codon optimized (GenScript) μDys (ΔR2-15/ΔR18-22/ΔCT) (24), followed by the rabbit beta-globin poly-adenylation (pA) signal, were generated using standard cloning techniques. The rAAV genomes containing the cardiac-muscle specific cTnT455 regulatory cassette, the codon optimized human RNR transgene flanked by 100-bp UTR's, and the rabbit beta-globin pA were generated as previously described (49). The ‘dead’ rAAV genomes or promoter-less firefly luciferase followed by the human growth hormone (hGH) pA (kindly provided by JSC, University of Washington, Seattle Wash.) were used to generate the control rAAV genomes. The resulting constructs were co-transfected with the pDG6 packaging plasmid into HEK293 cells to generate rAAV vectors carrying serotype 6 capsids, that were harvested, enriched, and quantitated as previously described (50).

### 3. Vector Genome Quantification

[0147] Total DNA was extracted from flash-frozen tissue samples with Tri-Reagent (MRC Inc.), according to manufacturer's instructions. All real-time PCR reactions were performed on a QuantStudio 3 Real Time PCR System (Applied Biosystems, Foster City, Calif.) in a total volume of 15 consisting of 5 μl sample DNA, 10.0 μl TaqMan Universal PCR Master Mix (Applied Biosystems, Foster City, Calif.), 0.2 μM of each primer, and 0.1 μM TaqMan custom probe (Applied Biosystems, Foster City, Calif.). Reaction conditions were 50° C. for 2 minutes, 95° C. for 10 minutes, and 40 cycles of 95° C. for 15 seconds followed by 60° C. for 1 minute. Each sample was analyzed in triplicate for concentration of total murine genomes and of total vector genomes. For vector genome detection by qPCR, the primers used to amplify either the rAAV6-cTnT455-RNR or rAAV6-CK8-μDys or rAAV6-ACMV-Luc (control vector) were unique to each vector. For the RNR vector the amplicon spanned from the distal region of the cTnT regulatory cassette, continuing into the proximal RNR1 subunit. For the μDys vector the amplicon was contained within the CK8 regulatory cassette, while the amplicon for the control vector resided within the human growth hormone (hGH) poly-adenylation. hGH Primers: 5′-CACAATCTTGGCTCACTGCAA-3′, 5′-GGAGGCTGAGGCAGGAGAA-3′, TaqMan Probe: 5′-6FAM-CTCCGCCTCCTGGGTTCAAGCG-MBGNQ-3′; CK8 RC Primers: 5′-CCCGAGATGCCTGGTTATAATT-3′, 5′-CGGGAACATGGCATGCA-3′, TaqMan Probe: 5′-6FAM-CCCCCCAACACCTGCTGCCTCT-MBGNQ-3′; cTnT455-RNR1 Primers: 5′-CCCAGTCCCCGCTGAGA-3′, 5′-AGGTTCCAGGCGCTGCT-3′, TaqMan Probe: 5′-6FAM-ACTCATCAATGTATCTTATCATG-MBGNQ-3′. Results were presented relative to DNA content in each 5 μl DNA tissue sample to determine vector genomes per ng DNA.

### 4. Tissue Processing and Imaging Analysis

[0148] Tissues were collected and analyzed 5 months post-administration of vectors and compared with age-matched male control vector (rAAV6-ACMV-Luc) injected mdx^{4cv} and wild-type (WT) mice. Hearts were either snap frozen in liquid nitrogen or were embedded in Optimal Cutting Temperature (O.C.T.) compound (VWR International) and flash frozen in liquid nitrogen cooled isopentane for histochemical or immunofluorescence analysis. The snap frozen samples were further processed by grinding to a powder under liquid nitrogen in a mortar kept on dry ice for subsequent extraction of nucleic acid and protein.

[0149] Heart cross-sections (10 μm) were co-stained with antibodies raised against alpha 2-laminin (Sigma, rat monoclonal, 1:200), the hinge-1 domain of dystrophin (alexa488 conjugated MANEX1011b, Developmental Studies Hybridoma Bank, University of Iowa, mouse monoclonal, 1:200), the human RRM1 (Abcam, rabbit monoclonal, 1:200), and the human RRM2 (Abcam, rabbit monoclonal, 1:200). Conjugated secondary antibodies (Jackson Immuno, Goat anti-Rabbit) were used at a 1:500 dilution. Slides were mounted using ProLong Gold with DAPI (Thermo Fisher Scientific) and imaged via a Leica SPV confocal microscope. Confocal micrographs covering a majority of the heart left ventricular muscle sections were acquired and montaged via the Fiji toolset (ImageJ) and InDesign (Adobe). For histology, Masson's trichrome staining was used to examine heart cross sections. Briefly, 10-μm muscle cryosections were sequentially stained in Wiegerts' iron hematoxylin (10 min), 1% Ponceau-acetic acid (5 min), and 1% aniline blue (5 s).

### 5. Western Blotting

[0150] Radioimmunoprecipitation analysis buffer (RIPA) supplemented with 5 mM EDTA and 3% protease inhibitor cocktail (Sigma, Cat #P8340), was used to extract muscle proteins for 0.5 hour on ice with gentle agitation every 10 min. Total protein concentration was determined using Pierce BCA assay kit (ThermoFisher). Muscle lysates from WT, control mdx^{4cv} and treated mdx^{4cv} (30 μg) mice were denatured at 99 degrees Celsius for 10 min, quenched on ice, and separated via gel electrophoresis after loading onto Criterion 4-12% Bis-Tris polyacrylamide gels (BioRad). Overnight protein transfer to 0.45 mm PVDF membranes was performed at constant 43 volts at 4-degrees Celsius in Towbin's buffer containing 20% methanol. Blots were blocked for 1 hour at room temperature in 5% non-fat dry milk for 1 hour before overnight incubation with antibodies raised against the hinge-1 region of dystrophin (Developmental Studies Hybridoma Bank, University of Iowa, 1:300), anti-RRM1 (Abcam, rabbit monoclonal, 1:1,000), anti-RRM2 (Abcam, rabbit monoclonal 1:1,000), and anti-GAPDH (Sigma, Rabbit polyclonal, 1:50,000). Horseradish-peroxidase conjugated secondary antibody staining (1:50,000) was performed for 1 h at room temperature before signal development using Clarity Western ECL substrate (BioRad) and visualization using a Chemidoc MP imaging system (BioRad).

6. Quantification of Cardiac [dATP]

[0151] Approximately 25 pg of flash frozen, freshly ground ventricle cardiac tissue was used for direct quantification of intracellular dATP using the HPLC-MS/MS method previously described (51). Briefly, samples were extracted 1-3 days before measurement using a 50% methanol solution. The supernatant was stored at −20° C. until ready for injection into the HPLC-MS/MS system. A Water's Xevo-TQ-S mass spectrometer coupled with a Water's Acquity I-Class HPLC was used for the analysis (Milford, Mass., USA). Monitoring in negative mode via an electrospray ionization (ESI) was used to acquire MS-MS ions. dATP concentrations were quantified with standards and normalized to tissue weight.

### 7. Langendorff Isolated Perfused Heart Experiments

[0152] Ex-vivo cardiac function was assessed in Langendorff isolated heart preparations as previously described (48,49,52). Hearts were perfused at a constant pressure of 80 mmHg with a modified Krebs-Henseleit (KH) buffer supplemented with glucose and pyruvate. The perfusate contained (in mmol/L): 118 NaCl, 25 NaHCO₃, 5.3 KCl, 2.0 CaCl2, 1.2 MgSO4, 0.5 EDTA, 10.0 glucose, and 0.5 pyruvate, equilibrated with 95% 02 and 5% CO2 (pH 7.4). Temperature was maintained at 37.5° C. throughout the protocol. Left ventricular (LV) function was monitored via a water-filled balloon inserted into the LV and connected to a pressure transducer. LV systolic pressure (LVSP), end diastolic pressure (EDP), heart rate (HR), and minimum and maximum rate of pressure change in the ventricle (±dP/dt) were obtained from the attached data acquisition system (PowerLab, ADInstruments, Colorado Springs, Colo.). After 5 minutes of stabilization, hearts were equilibrated for 10 minutes at spontaneous heart rates and then fixed at a heart rate of ˜450 bpm with an electrical stimulator (Grass Technologies, Warwick, R.I.). Pressure-volume relationships (i.e., Frank-Starling curves) were assessed by gradually increasing the volume of the LV balloon. After a 5-minute recovery period, the perfusate was changed to an identical buffer as above except for the addition of 4.0 mmol/L CaCl2 to simulate a high workload (HWL) challenge for 20 minutes.

### 8. Statistical Analysis

[0153] All values are reported as means±standard error of the mean (SEM). Starling curves and HWL function were analyzed by two-way repeated measures analysis of variance (ANOVA) followed by Tukey's post hoc analysis. End-point data was analyzed via one-way ANOVA or t-tests as appropriate. Mantel-Cox tests were used to analyze survival curves. Significance was tested at the P<0.05 level.

### Example 2: Results

[0154] i. Improvements in Baseline Cardiac Function in Vector-Treated mdx^{4cv} Hearts

[0155] As depicted in FIG. 1, 22-24 month-old mdx^{4cv} mice were administered one of three treatments: rAAV6-cTnT455-ribonucleotide reductase (RNR; referred to as mdx^{4cv}+RNR); rAAV6-CK8-micro-dystrophin (μDys; referred to as mdx^{4cv}+μDys), or rAAV6-ACMV-Firefly Luciferase control vector (referred to as mdx^{4cv}) at a dose of 2×10″ vg/kg. By the end of the 20-week treatment period, both mdx^{4cv}+RNR and mdx^{4cv}+μDys mice showed improvements in survival rates compared to mdx^{4cv} mice, although this did not reach statistical significance (FIG. 2). At the end of 5 months, an extensive evaluation of ex-vivo cardiac function using the Langendorff isolated heart preparation was performed. The isolated heart technique allows for the direct assessment of inherent myocardial function without the confounding effects of neuro-humoral or other systemic variables. An additional cohort of age-matched, untreated C57BL6 mice (WT) were used as comparison controls. At baseline, RPP was significantly decreased in mdx^{4cv} hearts due to an approximate 20% decrease in LVDevP (FIGS. 3A and 3B). RNR treated mdx^{4cv} mice exhibited a restoration of RPP (P=0.0564) primarily due to a normalization of LVDevP (FIGS. 3A and 3B). Although μDys treated mdx^{4cv} hearts appeared to normalize LVDevP, this did not lead to a significant improvement in RPP (FIGS. 3A and 3B). Both +dP/dt and −dP/dt, an index of ventricular contractility and relaxation, respectively, were decreased 30% in mdx^{4cv} hearts (P=0.06). The +dP/dt was similar to control in both RNR treated mdx^{4cv} and μDys treated mdx^{4cv} hearts. However, only RNR treated mdx^{4cv} hearts demonstrated −dP/dt values similar to control levels (FIGS. 3C and 3D).

2. Positive Changes in Frank-Starling Mechanics in Vector-Treated mdx^{4cv} Hearts

[0156] To evaluate further systolic and diastolic function in vector treated-mdx^{4cv} hearts, the pressure-volume relationship (i.e., Frank-Starling mechanism) in the isolated perfused heart preparation were examined. The left ventricular systolic pressure (LVSP) response to increased preload was significantly improved in both in mdx^{4cv}+RNR and mdx^{4cv}+μDys hearts compared to mdx^{4cv} (FIG. 4A). However, only RNR treatment improved the diastolic response in mdx^{4cv} hearts, to levels similar to WT (FIG. 4B). Both contractility and relaxation (i.e., +dP/dt and −dP/dt, respectively) were impaired in mdx^{4cv} compared to age-matched controls (FIGS. 4D and 4E). Both mdx^{4cv}+RNR and mdx^{4cv}+μDys hearts had significantly elevated +dP/dt values above mdx^{4cv} (FIG. 4E). Interestingly, treatment of mdx^{4cv} hearts with RNR also significantly improved −dP/dt values (FIG. 4D). These data suggest that both RNR and μDys treatment can improve systolic function in mdx^{4cv} hearts. However, these data showed that only the RNR treatment corrected diastolic dysfunction in mdx^{4cv} hearts.

3. Augmented Response to Increased Cardiac Workload in Treated mdx^{4cv} Hearts

[0157] It was previously reported that RNR overexpression in transgenic or vector-treated mouse hearts elevated baseline function but did not impair the response to an acute physiological increase in cardiac work (48,49). To verify that the improved systolic and diastolic function in RNR treated mdx^{4cv} hearts at baseline was not associated with an inability to respond to an increased energetic demand, hearts were stressed with a combination of high calcium and elevated heart rates, via pacing stimulation. As shown in FIGS. 5A and 5B, mdx^{4cv} hearts had a blunted response to the increased workload as both LVDevP and RPP were ˜25-30% lower than wild-type hearts. In addition both +dP/dt and −dP/dt were impaired in mdx^{4cv} relative to wild-type hearts (FIGS. 5C and 5D). Systolic parameters in mdx^{4cv}+μDys hearts were effectively improved and similar to age-matched wild-type hearts for the entire duration of the workload challenge (FIGS. 5A to 5C). Measures of systolic function significantly increased in mdx^{4cv}+RNR hearts during the initial half of the high workload protocol and remained ˜15% higher than mdx^{4cv} (FIGS. 5A to 5C). Interestingly, −dP/dt values tended to be elevated only in mdx^{4cv}+RNR hearts during the physiological challenge (FIG. 5D). These data show that both RNR and μDys treatments improve systolic function in mdx^{4cv} hearts without compromising cardiac reserve. Combined with the baseline and pressure-volume relationship assessments, these data demonstrate that, in addition to the systolic enhancements, RNR has an added benefit of improving diastolic function.

### 4. RNR and μDys Transduction, Expression, and Cardiomyocyte Localization

[0158] To evaluate the localization of RNR and micro-dystrophin protein within the hearts of mice, immunofluorescence imaging was performed. As shown in FIG. 6, the RNR subunit (RRM1) was robustly expressed in ventricles of RNR treated mice. The expression of μDys appeared to be saturated relative to full-length dystrophin levels, with both being properly localized to the sarcolemma of cardiomyocytes. Evaluations of general muscle histopathology and potential differences in myocardial fibrosis by Masson trichrome staining were also performed, and no discernable difference between treated or untreated mdx^{4cv} mice were observed (FIG. 7). In addition, neither RNR nor μDys treatment significantly altered body weight (BW), heart weight (HW), or the HW to BW ratio (FIG. 8). Western blotting was performed to determine the extent of rAAV6-mediated RNR and μDys protein expression profiles in ventricular tissue (FIG. 9). μDys protein expression in ventricular tissue that approached levels similar to wild-type mice were observed, while both human RNR subunits (RRM1 and RRM2) were found to be elevated to comparable levels within ventricular tissue (FIG. 9A). To evaluate the relative proportions of dATP concentrations within ventricular tissue, HPLC-MS/MS analysis was performed on ground ventricular tissue from mdx^{4cv} and mdx^{4cv}+RNR mice. The concentration of dATP within the ventricular tissue obtained from mdx^{4cv} mice treated with RNR (0.568±0.22 pmol dATP/mg) was approximately 10-fold higher relative to mdx^{4cv} controls (0.051±0.02 pmol dATP/mg) (FIG. 9B). For adult wildtype, an average dATP value of 0.021 pmol/mg tissue with a standard deviation of 0.007 was previously reported (51). Additionally, cardiac vector genome data was comparable relative to the vector dose administered (FIG. 9C).

### Example 3: Animal Models

[0159] Provided herein are animal models used in pre-clinical research for DMD therapeutic development.

i. mdx

[0160] Mouse models have been used extensively to elucidate the pathogenic mechanisms of DMD, and have been indispensable in the development of therapeutic approaches. The mdx mouse is the most commonly used animal model for the analysis dystrophin expression and function. The mdx mouse contains a premature stop codon in exon 23 that leads to loss of full-length dystrophin, although smaller isoforms are still expressed.^{1,2} The mdx skeletal muscle shows moderate signs of dystrophy, young mice exhibit modest weakness and live ˜80% as long as controls, significantly more than that of DMD patients.³

[0161] Histological examination of mdx muscle during various stages of development reveals that muscle fiber necrosis and cellular infiltration begin at approximately 3 weeks of age. This is followed by a crisis period that peaks at approximately 4-6 weeks of age and is characterized by the presence of extensive necrosis, regenerating muscle fibers with centrally located nuclei, and elevated levels of serum creatine kinase (CK).^{1,4} After 12 weeks, the cycles of necrosis and regeneration begin to slow, although necrotic myofibers are present for the remainder of their lifespan. The fibrosis and infiltration of inflammatory cells in skeletal and cardiac muscle of the mdx are much milder than that observed in DMD patients.^{5,6} Similarly cardiomyopathy does not typically manifest until advanced age and often requires sensitive assays for functional deficit detection.^{7,8} In contrast, the mdx mouse diaphragm exhibits severe pathological changes and functional deficits comparable to that of DMD limb muscle.^{9,10} Four additional strains of mdx mice, mdx2cv-5cv, have been generated with N-ethylnitrosourea chemical mutagenesis.¹¹ All these strains have point mutations that lead to loss of full-length dystrophin isoforms. The relative location of these mutations results in a series of mdx mouse mutants that vary in their expression of different dystrophin isoforms.¹² Regardless of their differences, all five mdx strains display essentially identical muscle pathology as mdx mice, although additional phenotypes have been observed.^{11,13,14}

2. mdx4cv

[0162] The mdx4cv strain displays a low background of reverent dystrophin containing fibers, making it a particularly useful strain in gene transfer studies exploring the feasibility of DMD therapy.¹⁴⁻¹⁶ Genetically, the mdx4cv mouse, has a point mutation that creates a stop codon in exon 53, and like other mdx strains displays a late-onset cardiomyopathy.¹⁷ Nonetheless, the mdx4cv was chosen as the model to demonstrate the robust benefits of AAV-mediated RNR & micro-dystrophin expression toward improvement of cardiac function.¹⁸

3. mdx:utrn−/− and mdx:utrn−/+

[0163] In efforts to make the mdx muscle phenotype more similar to that of patients, several additional mutations have been crossed onto the mdx background to generate double knockouts (DKOs). The most widely used is a dystrophin:utrophin DKO (mdx:utrn−/−).^{19,20} DKO mice display a severe phenotype including advanced cardiomyopathy, mild skeletal muscle fibrosis and an average lifespan of only ˜3 months. The severity of the phenotype supports the concept that utrophin upregulation in dystrophic muscles partially compensates for the absence of dystrophin. Further, the DKO mice have proved useful in gene therapy studies, where the phenotype can be largely eliminated by muscle-specific expression of utrophin, mini-utrophin, or mini- or micro-dystrophin.^{15,16,19-22} Additionally, the mdx:utrn+/−(het) mice have been quite useful, which display a normal (“mdx”) lifespan (˜2 yr) with severe skeletal muscle fibrosis and cardiomyopathy progression more similar to DMD patients making them an attractive model, particularly for cardiac studies.^{23,24}

### 4. Dmdmdx Rat

[0164] Generated by TALENs targeting exon 23, two lines of Dmdmdx rats both demonstrate undetectable levels of dystrophin.²⁵ At 3-months of age the Dmdmdx hearts are notably dilated showing increased left ventricular (LV) diameter with LV wall thinning²⁶ At 7 months, limb and respiratory muscles also showed severe fibrosis and some adipose tissue infiltration. Concomitment with the histopathology results, Dmdmdx rats also showed significant reduction in muscle strength and a decrease in locomotion.²⁶ Demonstrating a more clinically relevant disease progression, particularly as it relates to cardiac function and histopathology, the Dmdmdx rat has gained momentum for the evaluation of gene therapies.

### 5. Canine Model of Duchenne Muscular Dystrophy

[0165] As a large animal model for DMD, spontaneous mutations causing dystrophinopathy have been identified in several breeds of dog.27,28 This led to the generation of multiple colonies of the golden retriever muscular dystrophy dog (GRMD) being created, and is the most extensively studied breed for this model.29,30 Due to prior use in research and its smaller size, the GRMD mutation has been bred onto the beagle background.31,32 Severe symptoms commonly appear at 6 months of age in the GRMD dog, but unlike the mdx mouse, the degree of severity and time of progression are quite variable. However, use of the GRMD model for potential therapies has gained much emphasis with its more clinically similar pathology than the mdx mouse model.

### Example 4: Delivery Vehicles

### AAV Serotypes for Neuromuscular Disease

[0166] Recombinant adeno-associated viral vectors (rAAV) have received considerable attention as prospective gene delivery vectors for the treatment of genetic diseases¹⁻⁶. In the case of severe neuromuscular conditions such as Duchenne muscular dystrophy, using rAAV for gene therapy for intervention would require the transduction of at least 40-50% of muscle fibers in the body⁷⁻¹⁰.

[0167] A number of recombinant AAV serotypes, in particular serotypes 1, 6, 8, and 9, have been shown to transduce striated muscle with high efficiency^{11-14.} Indeed, our group has investigated numerous serotype comparisons over the past decade or so. As an example, in vitro myotube cultures (mouse (MM14), canine, & human) were grown, inoculated & compared for indicated reporter gene expression utilizing AAV6, AAV8, & AAV9 serotypes where each species demonstrates a preferential expression pattern with AAV6 transduction (FIG. 10). All vector preparations included the muscle specific regulatory cassette CK8e driving expression of human placental alkaline phosphatase (hPLAP) as previously described.¹⁵ In this study, the presence of empty capsids aided the transduction efficiency of AAV6 and AAV9 in mature human myotube cultures, but appear to hinder that of AAV9 in MM14 cultures. The transduction efficiency of AAV8 was the lowest compared to AAV6 and 9 in mouse and human mature myotube cultures, but was similar to AAV6 in canine myotube cultures. In contrast, AAV9 transduced poorly in canine myotube cultures.

[0168] While previous reports have studied the dose response effects of rAAV in intramuscular injections, or in systemic injections of a vector encoding a secreted protein¹⁶⁻¹⁸ we sought to examine the relative expression levels of a non-secreted protein in various striated muscles following systemic rAAV6 administration at increasing doses. We observed an apparent dose-response threshold common to all striated muscles, as well as an individual muscle-specific transduction profile (FIG. 11).

[0169] Finally, common methods of rAAV production typically generate a yield comprising 80-90% genome-devoid (or so-called “empty”) capsids that may be included or removed from the vector preparation prior to use, depending on purification/enrichment methods^{18,19} As empty capsids have been reported to decrease transduction in intramuscular injections¹⁸, we sought to test the hypothesis that a supplementary dose of empty capsids may affect transduction by “full” vectors when administered via systemic co-delivery. We found that empty capsids enhance transduction in striated muscles via intravenous administration, in a serotype-specific manner (FIG. 12). Collectively, our results suggest a capsid-specific protein load dependent mechanism of whole body transduction with rAAV6. Improving upon striated muscle transduction continues to be an interest of our combined group moving forward.

### Example 3: Additional Examples of Engineered RNR Constructs

[0170] Various combinations of different promotors, an engineered version of the RNR enzyme that resists degradation, and an RNR construct that contains a different gene for the RRM2b subunit that also resists degradation were compared. Three separate studies were conducted in young and old mice. Mice received systemic injections of the AAV vectors and hearts were harvested one month later for analysis of dATP content (FIG. 13A-13F).

[0171] It will be readily understood that the embodiments, as generally described herein, are exemplary. The following more detailed description of various embodiments is not intended to limit the scope of the present disclosure, but is merely representative of various embodiments. Moreover, the order of the steps or actions of the methods disclosed herein may be changed by those skilled in the art without departing from the scope of the present disclosure. In other words, unless a specific order of steps or actions is required for proper operation of the embodiment, the order or use of specific steps or actions may be modified.

[0172] Groupings of alternative elements or embodiments of the invention disclosed herein are not to be construed as limitations. Each group member may be referred to and claimed individually or in any combination with other members of the group or other elements found herein. It is anticipated that one or more members of a group may be included in, or deleted from, a group for reasons of convenience and/or patentability. When any such inclusion or deletion occurs, the specification is deemed to contain the group as modified thus fulfilling the written description of all Markush groups used in the appended claims.

[0173] Certain embodiments of this invention are described herein, including the best mode known to the inventors for carrying out the invention. Of course, variations on these described embodiments will become apparent to those of ordinary skill in the art upon reading the foregoing description. The applicants expect skilled artisans to employ such variations as appropriate, and the applicants intend for the various embodiments of the disclosure to be practiced otherwise than specifically described herein. Accordingly, this disclosure includes all modifications and equivalents of the subject matter recited in the claims appended hereto as permitted by applicable law. Moreover, any combination of the above-described elements in all possible variations thereof is encompassed by the disclosure unless otherwise indicated herein or otherwise clearly contradicted by context.

[0174] Furthermore, numerous references have been made to patents and printed publications throughout this application. Each of the references and printed publications recited in this application are individually incorporated herein by reference in their entirety.

[0175] It is to be understood that the embodiments of the present disclosure are illustrative of the principles of the present disclosure. Other modifications that may be employed are within the scope of the disclosure. Thus, by way of example, but not of limitation, alternative configurations of the present disclosure may be utilized in accordance with the teachings herein. Accordingly, the present disclosure is not limited to that precisely as shown and described.

[0176] The particulars shown herein are by way of example and for purposes of illustrative discussion of the preferred embodiments of the present disclosure only and are presented in the cause of providing what is believed to be the most useful and readily understood description of the principles and conceptual aspects of various embodiments of the disclosure.

[0177] Definitions and explanations used in the present disclosure are meant and intended to be controlling in any future construction unless clearly and unambiguously modified in the examples or when application of the meaning renders any construction meaningless or essentially meaningless in cases where the construction of the term would render it meaningless or essentially meaningless, the definition should be taken from Webster's Dictionary, 3rd Edition or a dictionary known to those of ordinary skill in the art, such as the Oxford Dictionary of Biochemistry and Molecular Biology (Ed. Anthony Smith, Oxford University Press, Oxford, 2004).

[0178] It will be apparent to those having skill in the art that many changes may be made to the details of the above-described embodiments without departing from the underlying principles of the invention.

### APPENDIX

### References

[0179] i. Emery A E and Muntoni F. Duchenne Muscular Dystrophy. 3rd ed. Oxford: Oxford University Press. 2003: 270.
[0180] ii. Ervasti J M. Structure and function of the dystrophin-glycoprotein complex. in Molecular Mechanisms of Muscular Dystrophies. S. J. Winder, Editor. Landes Biosciences: Georgetown. 2006: 1-13.
[0181] iii. Cox G A, Phelps S F, Chapman V M, and Chamberlain J S. New mdx mutation disrupts expression of muscle and nonmuscle isoforms of dystrophin. Nature Genet. 1993; 4: 87-93.
[0182] iv. Brooks S V and Faulkner J A. Contractile properties of skeletal muscles from young, adult and aged mice. Journal of Physiology (London). 1988; 404: 71-82.
[0183] v. Campbell K P. Three muscular dystrophies: loss of cytoskeleton-extracellular matrix linkage. Cell. 1995; 80: 675-679.
[0184] vi. Petrof B J, Shrager J B, Stedman H H, Kelly A M, and Sweeney H L. Dystrophin protects the sarcolemma from stresses developed during muscle contraction. Proc. Natl. Acad. Sci. USA. 1993; 90: 3710-3714.
[0185] vii. Ramaswamy K S, Palmer M L, van der Meulen J H, et al. Lateral transmission of force is impaired in skeletal muscles of dystrophic mice and very old rats. J Physiol. 2011; 589(Pt 5): 1195-208.
[0186] viii. Chao D S, Gorospe J R, Brenman J E, et al. Selective loss of sarcolemmal nitric oxide synthase in Becker muscular dystrophy. J Exp Med. 1996; 184(2): 609-18.
[0187] ix. Froehner S C. Just say N O to muscle degeneration? Trends Mol Med. 2002; 8(2): 51-3.
[0188] x. Grady R M, Grange R W, Lau K S, et al. Role for alpha-dystrobrevin in the pathogenesis of dystrophin-dependent muscular dystrophies. Nat Cell Biol. 1999; 1(4): 215-20.
[0189] xi. Lapidos K A, Kakkar R, and McNally E M. The dystrophin glycoprotein complex: signaling strength and integrity for the sarcolemma. Circ Res. 2004; 94(8): 1023-31.
[0190] xii. Ervasti J M and Campbell K P. A role for the dystrophin-glycoprotein complex as a transmembrane linker between laminin and actin. J Cell Biol. 1993; 122(4): 809-23.
[0191] xiii. Ibraghimov-Beskrovnaya O, Ervasti J M, Leveille C J, et al. Primary structure of dystrophin-associated glycoproteins linking dystrophin to the extracellular matrix. Nature. 1992; 355(6362): 696-702.
[0192] xiv. Yoshida M and Ozawa E. Glycoprotein complex anchoring dystrophin to sarcolemma. J Biochem (Tokyo).

[0193] 1990; 108(5): 748-52.
[0194] xv. England S B, Nicholson L V, Johnson M A, et al. Very mild muscular dystrophy associated with the deletion of 46% of dystrophin. Nature. 1990; 343: 180-182.
[0195] xvi. Valentine B A, Winand N J, Pradhan D, et al. Canine X-linked muscular dystrophy as an animal model of Duchenne muscular dystrophy: a review. Am. J. Med. Genet. 1992; 42: 352-356.
[0196] xvii. Im W B, Phelps S F, Copen E H, et al. Differential expression of dystrophin isoforms in strains of mdx mice with different mutations. Hum Mol Genet. 1996; 5(8): 1149-53.
[0197] xviii. Phelps S F, Hauser M A, Cole N M, et al. Expression of full-length and truncated dystrophin mini-genes in transgenic mdx mice. Hum. Mol. Genet. 1995; 4: 1251-1258.
[0198] xix. Crawford G E, Faulkner J A, Crosbie R H, et al. Assembly of the dystrophin-associated protein complex does not require the dystrophin COOH-terminal domain. Journal of Cell Biology. 2000; 150(6): 1399-410.
[0199] xx. Harper S Q, Hauser M A, DelloRusso C, et al. Modular flexibility of dystrophin: Implications for gene therapy of Duchenne muscular dystrophy. Nature Medicine. 2002; 8(3): 253-61.
[0200] xxi. Wang B, Li J, and Xiao X. Adeno-associated virus vector carrying human minidystrophin genes effectively ameliorates muscular dystrophy in mdx mouse model. Proceedings of the National Academy of Sciences of the United States of America. 2000; 97(25): 13714-9.
[0201] xxii. Sakamoto M, Yuasa K, Yoshimura M, et al. Micro-dystrophin cDNA ameliorates dystrophic phenotypes when introduced into mdx mice as a transgene. Biochem Biophys Res Commun. 2002; 293(4): 1265-72.
[0202] xxiii. Chamberlain J S. Gene therapy of muscular dystrophy. Hum Mol Genet. 2002; 11(20): 2355-62.
[0203] xxiv. Hakim C H, Wasala N B, Pan X, et al. A Five-Repeat Micro-Dystrophin Gene Ameliorated Dystrophic Phenotype in the Severe DBA/2J-mdx Model of Duchenne Muscular Dystrophy. Mol Ther Methods Clin Dev. 2017; 6: 216-230.
[0204] xxv. Cox G A, Cole N M, Matsumura K, et al. Overexpression of dystrophin in transgenic mdx mice eliminates dystrophic symptoms without toxicity [see comments]. Nature. 1993; 364(6439): 725-9.
[0205] xxvi. Stedman H H, Sweeney H L, Shrager J B, et al. The mdx mouse diaphragm reproduces the degenerative changes of Duchenne muscular dystrophy. Nature. 1991; 352: 536-539.
[0206] xxvii. Brooks S V and Faulkner J A. Skeletal muscle weakness in old age: underlying mechanisms. Medical

[0207] Science and Sports Exercise. 1994; 26(4): 432-9.
[0208] xxviii. DelloRusso C, Crawford R, Chamberlain J, and Brooks S. Tibialis anterior muscles of mdx mice are highly susceptible to contraction-induced injury. Journal of Muscle Research and Cell Motility. 2001; 22: 467-475.
[0209] xxix. Lynch G S, Hinkle R T, Chamberlain J S, Brooks S V, and Faulkner J A. Force and power output of fast and slow skeletal muscles from mdx mice 6-28 months old. J Physiol. 2001; 535(Pt 2): 591-600.
[0210] xxx. Bostick B, Shin J H, Yue Y, et al. AAV micro-dystrophin gene therapy alleviates stress-induced cardiac death but not myocardial fibrosis in >21-m-old mdx mice, an end-stage model of Duchenne muscular dystrophy cardiomyopathy. J Mol Cell Cardiol. 2012; 53(2): 217-22.
[0211] xxxi. Gregorevic P, Blankinship M J, Allen J M, and Chamberlain J S. Systemic microdystrophin gene delivery improves skeletal muscle structure and function in old dystrophic mdx mice. Mol Ther. 2008; 16(4): 657-64.
[0212] xxxii. Quinlan J G, Hahn H S, Wong B L, et al. Evolution of the mdx mouse cardiomyopathy: physiological and morphological findings Neuromuscul Disord. 2004; 14(8-9): 491-6.
[0213] xxxiii. Gregorevic P, Allen J M, Minami E, et al. rAAV6-microdystrophin preserves muscle function and extends lifespan in severely dystrophic mice. Nat Med. 2006; 12(7): 787-9.
[0214] xxxiv. Shin J H, Nitahara-Kasahara Y, Hayashita-Kinoh H, et al. Improvement of cardiac fibrosis in dystrophic mice by rAAV9-mediated microdystrophin transduction. Gene Ther. 2011; 18(9): 910-9.
[0215] xxxv. Townsend D, Blankinship M J, Allen J M, et al. Systemic administration of micro-dystrophin restores cardiac geometry and prevents dobutamine-induced cardiac pump failure. Mol Ther. 2007; 15(6): 1086-92.
[0216] xxxvi. Bostick B, Shin J H, Yue Y, and Duan D. AAV-microdystrophin therapy improves cardiac performance in aged female mdx mice. Mol Ther. 2011; 19(10): 1826-32.
[0217] xxxvii. Townsend D, Yasuda S, Chamberlain J, and Metzger J M. Cardiac consequences to skeletal muscle-centric therapeutics for Duchenne muscular dystrophy. Trends Cardiovasc Med. 2009; 19(2): 50-55.
[0218] xxxviii. Adhikari B B, Regnier M, Rivera A J, Kreutziger K L, and Martyn D A. Cardiac length dependence of force and force development kinetics with altered cross-bridge cycling. Biophysical Journal. 2004; 87: 1784-1794.
[0219] xxxix. Clemmens E W, Entezari M, Martyn D A, and Regnier M. Different effects of cardiac versus skeletal muscle regulatory proteins on in vitro measures of actin filament speed and force. J Physiol. 2005; 566(Pt 3): 737-46.
[0220] xl. Korte F S, Dai J, Buckley K, et al. Upregulation of cardiomyocyte ribonucleotide reductase increases intracellular 2 deoxy-ATP, contractility, and relaxation. J Mol Cell Cardiol. 2011; 51(6): 894-901.
[0221] xli. Kreutziger K L, Piroddi N, Belus A, Poggesi C, and Regnier M. Ca2+-binding kinetics of troponin C influence force generation kinetics in cardiac muscle. Biophysical Journal. 2007; 92(Suppl): 477a.
[0222] xlii. Kreutziger K L, Piroddi N, J. T. M, et al. Cooperative activation and tension kinetics in cardiac muscle are strongly modulated by calcium binding kinetics of troponin C. Journal of Molecular and Cellular Cardiology. 2011; 50(1): 165-174.
[0223] xliii. Moussavi-Harami F, Razumova M V, Racca A W, et al. 2-Deoxy adenosine triphosphate improves contraction in human end-stage heart failure. J Mol Cell Cardiol. 2015; 79: 256-63.
[0224] xliv. Regnier M, Lee D M, and Homsher E. ATP analogs and muscle contraction: mechanics and kinetics of nucleoside triphosphate binding and hydrolysis. Biophys J. 1998; 74(6): 3044-58.
[0225] xlv. Regnier M, Martin H, Barsotti R J, et al. Cross-bridge versus thin filament contributions to the level and rate of force development in cardiac muscle. Biophys J. 2004; 87(3): 1815-24.
[0226] xlvi. Regnier M, Rivera A J, Chen Y, and Chase P B. 2-deoxy-ATP enhances contractility of rat cardiac muscle. Circ Res. 2000; 86(12): 1211-7.
[0227] xlvii. Cheng Y, Hogarth K A, O'Sullivan M L, Regnier M, and Pyle W G. 2-Deoxyadenosine triphosphate restores the contractile function of cardiac myofibril from adult dogs with naturally occurring dilated cardiomyopathy. Am J Physiol Heart Circ Physiol. 2016; 310(1): H80-91.
[0228] xlviii. Nowakowski S G, Kolwicz S C, Korte F S, et al. Transgenic overexpression of ribonucleotide reductase improves cardiac performance. Proc Natl Acad Sci USA. 2013; 110(15): 6187-92.
[0229] xlix. Kolwicz S C, Jr., Odom G L, Nowakowski S G, et al. AAV6-mediated Cardiac-specific Overexpression of Ribonucleotide Reductase Enhances Myocardial Contractility. Mol Ther. 2016; 24(2): 240-50.
[0230] l. Halbert C L, Allen J M, and Chamberlain J S. AAV6 Vector Production and Purification for Muscle Gene Therapy. Methods Mol Biol. 2018; 1687: 257-266.
[0231] li. Olafsson S, Whittington D, Murray J, Regnier M, and Moussavi-Harami F. Fast and sensitive HPLC-MS/MS method for direct quantification of intracellular deoxyribonucleoside triphosphates from tissue and cells. J Chromatogr B Analyt Technol Biomed Life Sci. 2017; 1068-1069: 90-97.
[0232] lii. Kolwicz S C, Jr. and Tian R. Assessment of cardiac function and energetics in isolated mouse hearts using 31P NMR spectroscopy. J Vis Exp. 2010; 42: e2069.
[0233] liii. Kadota S, Carey J, Reinecke H, et al. Ribonucleotide reductase-mediated increase in dATP improves cardiac performance via myosin activation in a large animal model of heart failure. Eur J Heart Fail. 2015; 17(8): 772-81.
[0234] liv. Lundy S D, Murphy S A, Dupras S K, et al. Cell-based delivery of dATP via gap junctions enhances cardiac contractility. J Mol Cell Cardiol. 2014; 72: 350-9.
[0235] lv. Khairallah M, Khairallah R, Young M E, et al. Metabolic and signaling alterations in dystrophin-deficient hearts precede overt cardiomyopathy. J Mol Cell Cardiol. 2007; 43(2): 119-29.
[0236] lvi. Zhang W, ten Hove M, Schneider J E, et al. Abnormal cardiac morphology, function and energy metabolism in the dystrophic mdx mouse: an MRI and MRS study. J Mol Cell Cardiol. 2008; 45(6): 754-60.
[0237] lvii. Stuckey D J, Carr C A, Camelliti P, et al. In vivo MRI characterization of progressive cardiac dysfunction in the mdx mouse model of muscular dystrophy. PLoS One. 2012; 7(1): e28569.
[0238] lviii. Bostick B, Yue Y, and Duan D. Gender influences cardiac function in the mdx model of Duchenne cardiomyopathy. Muscle Nerve. 2010; 42(4): 600-3.
[0239] lix. Bell R M, Mocanu M M, and Yellon D M. Retrograde heart perfusion: the Langendorff technique of isolated heart perfusion. J Mol Cell Cardiol. 2011; 50(6): 940-50.
[0240] lx. Liao R, Podesser B K, and Lim C C. The continuing evolution of the Langendorff and ejecting murine heart: new advances in cardiac phenotyping. Am J Physiol Heart Circ Physiol. 2012; 303(2): H156-67.
[0241] lxi. Kaspar R W, Allen H D, Ray W C, et al. Analysis of dystrophin deletion mutations predicts age of cardiomyopathy onset in becker muscular dystrophy. Circ Cardiovasc Genet. 2009; 2(6): 544-51.
[0242] lxii. Feng J, Yan J, Buzin C H, Towbin J A, and Sommer S S. Mutations in the dystrophin gene are associated with sporadic dilated cardiomyopathy. Mol Genet Metab. 2002; 77(1-2): 119-26.
[0243] lxiii. Ortiz-Lopez R, Li H, Su J, Goytia V, and Towbin J A. Evidence for a dystrophin missense mutation as a cause of X-linked dilated cardiomyopathy. Circulation. 1997; 95(10): 2434-40.
[0244] lxiv. Singh S M, Bandi S, Shah D D, Armstrong G, and Mallela K M. Missense mutation Lys18Asn in dystrophin that triggers X-linked dilated cardiomyopathy decreases protein stability, increases protein unfolding, and perturbs protein structure, but does not affect protein function. PLoS One. 2014; 9(10): e110439.
[0245] lxv. Lee T H, Eun L Y, Choi J Y, et al. Myocardial atrophy in children with mitochondrial disease and Duchenne muscular dystrophy. Korean J Pediatr. 2014; 57(5): 232-9.
[0246] lxvi. Matsuoka S, Ii K, Akita H, et al. Clinical features and cardiopulmonary function of patients with atrophic heart in Duchenne muscular dystrophy. Jpn Heart J. 1987; 28(5): 687-94.
[0247] lxvii. Konstam M A, Kramer D G, Patel A R, Maron M S, and Udelson J E. Left ventricular remodeling in heart failure: current concepts in clinical significance and assessment. JACC Cardiovasc Imaging. 2011; 4(1): 98-108.
[0248] lxviii. Silva M C, Meira Z M, Gurgel Giannetti J, et al. Myocardial delayed enhancement by magnetic resonance imaging in patients with muscular dystrophy. J Am Coll Cardiol. 2007; 49(18): 1874-9.
[0249] lxix. Shirokova N and Niggli E. Cardiac phenotype of Duchenne Muscular Dystrophy: insights from cellular studies. J Mol Cell Cardiol. 2013; 58: 217-24.
[0250] lxx. Nigro G, Comi L I, Politano L, and Bain R J. The incidence and evolution of cardiomyopathy in Duchenne muscular dystrophy. Int J Cardiol. 1990; 26(3): 271-7.
[0251] lxxi. Li Y, Zhang S, Zhang X, et al. Blunted cardiac beta-adrenergic response as an early indication of cardiac dysfunction in Duchenne muscular dystrophy. Cardiovasc Res. 2014; 103(1): 60-71.
[0252] lxxii. Barbin I C, Pereira J A, Bersan Rovere M, et al. Diaphragm degeneration and cardiac structure in mdx mouse: potential clinical implications for Duchenne muscular dystrophy. J Anat. 2016; 228(5): 784-91.
[0253] lxxiii. Costas J M, Nye D J, Henley J B, and Plochocki J H. Voluntary exercise induces structural remodeling in the hearts of dystrophin-deficient mice. Muscle Nerve. 2010; 42(6): 881-5.
[0254] lxxiv. Nakamura A, Yoshida K, Takeda S, Dohi N, and Ikeda S. Progression of dystrophic features and activation of mitogen-activated protein kinases and calcineurin by physical exercise, in hearts of mdx mice. FEBS Lett. 2002; 520(1-3): 18-24.

SEQUENCES

SEQ ID NO: 1 is the nucleotide sequence encoding human RRM1, isoform 1.
GeneID: 6240
NCBI Reference Sequence: NG_027992.2
SEQ ID NO: 2 is the amino acid sequence for human RRM1, isoform 1.
MHVIKRDGRQERVMFDKITSRIQKLCYGLNMDFVDPAQITMKVI
QGLYSGVTTVELDTLAAETAATLTTKHPDYAILAARIAVSNLHKETKKVFSDVMEDLY
NYINPHNGKHSPMVAKSTLDIVLANKDRLNSAITYDRDFSYNYFGFKTLERSYLLKIN
GKVAERPQHMLMRVSVGIHKEDIDAAIETYNLLSERWFTHASPTLFNAGTNRPQLSSC
FLLSMKDDSIEGIYDTLKQCALISKSAGGIGVAVSCIRATGSYIAGTNGNSNGLVPML
RVYNNTARYVDQGGNKRPGAFAIYLEPWHLDIFEFLDLKKNTGKEEQRARDLFFALWI
PDLFMKRVETNQDWSLMCPNECPGLDEVWGEEFEKLYASYEKQGRVRKVVKAQQLWYA
IIESQTETGTPYMLYKDSCNRKSNQQNLGTIKCSNLCTEIVEYTSKDEVAVCNLASLA
LNMYVTSEHTYDFKKLAEVTKVVVRNLNKIIDINYYPVPEACLSNKRHRPIGIGVQGL
ADAFILMRYPFESAEAQLLNKQIFETIYYGALEASCDLAKEQGPYETYEGSPVSKGIL
QYDMWNVTPTDLWDWKVLKEKIAKYGIRNSLLIAPMPTASTAQILGNNESIEPYTSNI
YTRRVLSGEFQIVNPHLLKDLTERGLWHEEMKNQIIACNGSIQSIPEIPDDLKQLYKT
VWEISQKTVLKMAAERGAFIDQSQSLNIHIAEPNYGKLTSMHFYGWKQGLKTGMYYLR
TRPAANPIQFTLNKEKLKDKEKVSKEEEEKERNTAAMVCSLENRDECLMCGS
SEQ ID NO: 3 is the mRNA sequence for human RRM1, isoform 1.
>NM_001033.5 Homo sapiens ribonucleotide reductase catalytic subunit M1
(RRM1), transcript variant 1, mRNA
CCCTTTGTGCGTCACGGGTGGCGGGCGCGGGAAGGGGATTTGGATTGTTGCGCCTCTGCTCTGAAGAAAG
TGCTGTCTGGCTCCAACTCCAGTTCTTTCCCCTGAGCAGCGCCTGGAACCTAACCCTTCCCACTCTGTCA
CCTTCTCGATCCCGCCGGCGCTTTAGAGCCGCAGTCCAGTCTTGGATCCTTCAGAGCCTCAGCCACTAGC
TGCGATGCATGTGATCAAGCGAGATGGCCGCCAAGAACGAGTCATGTTTGACAAAATTACATCTCGAATC
CAGAAGCTTTGTTATGGACTCAATATGGATTTTGTTGATCCTGCTCAGATCACCATGAAAGTAATCCAAG
GCTTGTACAGTGGGGTCACCACAGTGGAACTAGATACTTTGGCTGCTGAAACAGCTGCAACCTTGACTAC
TAAGCACCCTGACTATGCTATCCTGGCAGCCAGGATCGCTGTCTCTAACTTGCACAAAGAAACAAAGAAA
GTGTTCAGTGATGTGATGGAAGACCTCTATAACTACATAAATCCACATAATGGCAAACACTCTCCCATGG
TGGCCAAGTCAACATTGGATATTGTTCTGGCCAATAAAGATCGCCTGAATTCTGCTATTATCTATGACCG
AGATTTCTCTTACAATTACTTCGGCTTTAAGACGCTAGAGCGGTCTTATTTGTTGAAGATCAATGGAAAA
GTGGCTGAAAGACCACAACATATGTTGATGAGAGTATCTGTTGGGATCCACAAAGAAGACATTGATGCAG
CAATTGAAACATATAATCTTCTTTCTGAGAGGTGGTTTACTCATGCTTCGCCCACTCTCTTCAATGCTGG
TACCAACCGCCCACAACTTTCTAGCTGTTTTCTTCTGAGTATGAAAGATGACAGCATTGAAGGCATTTAT
GACACTCTAAAGCAATGTGCATTGATTTCTAAGTCTGCTGGAGGAATTGGTGTTGCTGTGAGTTGTATTC
GGGCTACTGGCAGCTACATTGCTGGGACTAATGGCAATTCCAATGGCCTTGTACCGATGCTGAGAGTATA
TAACAACACAGCTCGATATGTGGATCAAGGTGGGAACAAGCGTCCTGGGGCATTTGCTATTTACCTGGAG
CCTTGGCATTTAGACATCTTTGAATTCCTTGATTTAAAGAAGAACACAGGAAAGGAAGAGCAGCGTGCCA
GAGATCTTTTCTTTGCTCTTTGGATTCCGGATCTCTTCATGAAACGAGTGGAGACTAATCAGGACTGGTC
TTTGATGTGTCCAAATGAGTGTCCTGGTCTGGATGAGGTTTGGGGAGAGGAATTTGAGAAACTATATGCA
AGTTATGAGAAACAAGGTCGTGTCCGCAAAGTTGTAAAAGCTCAGCAGCTTTGGTATGCCATCATTGAGT
CTCAGACGGAAACAGGCACCCCGTATATGCTCTACAAAGATTCCTGTAATCGAAAGAGCAACCAGCAGAA
CCTGGGAACCATCAAATGCAGCAACCTGTGCACAGAAATAGTGGAGTACACCAGCAAAGATGAGGTTGCT
GTTTGTAATTTGGCTTCCCTGGCCCTGAATATGTATGTCACATCAGAACACACATACGACTTTAAGAAGT
TGGCTGAAGTCACTAAAGTCGTTGTCCGAAACTTGAATAAAATTATTGATATAAACTACTATCCTGTACC
AGAGGCATGCCTATCAAATAAACGCCATCGCCCCATTGGAATTGGGGTACAAGGTCTGGCAGATGCTTTT
ATCCTGATGAGATACCCTTTTGAGAGTGCAGAAGCCCAGTTACTGAATAAGCAGATCTTTGAAACTATTT
ATTATGGTGCTCTGGAAGCCAGCTGTGACCTTGCCAAGGAGCAGGGCCCATACGAAACCTATGAGGGCTC
TCCAGTTAGCAAAGGAATTCTTCAGTATGATATGTGGAATGTTACTCCTACAGACCTATGGGACTGGAAG
GTTCTCAAGGAGAAGATTGCAAAGTATGGTATAAGAAACAGTTTACTTATTGCCCCGATGCCTACAGCTT
CCACTGCTCAGATCCTGGGGAATAATGAGTCCATTGAACCTTACACCAGCAACATCTATACTCGCAGAGT
CTTGTCAGGAGAATTTCAGATTGTAAATCCTCACTTATTGAAAGATCTTACCGAGCGGGGCCTATGGCAT
GAAGAGATGAAAAACCAGATTATTGCATGCAATGGCTCTATTCAGAGCATACCAGAAATTCCTGATGACC
TGAAGCAACTTTATAAAACTGTGTGGGAAATCTCTCAGAAAACTGTTCTCAAGATGGCAGCTGAGAGAGG
TGCTTTCATTGATCAAAGCCAATCTTTGAACATCCACATTGCTGAGCCTAACTATGGCAAACTCACTAGT
ATGCACTTCTACGGCTGGAAGCAGGGTTTGAAGACTGGGATGTATTATTTAAGGACAAGACCAGCGGCTA
ATCCAATCCAGTTCACTCTAAATAAGGAGAAGCTAAAAGATAAAGAAAAGGTATCAAAAGAGGAAGAAGA
GAAGGAGAGGAACACAGCAGCCATGGTGTGCTCTTTGGAGAATAGAGATGAATGTCTGATGTGTGGATCC
TGAGGAAAGACTTGGAAGAGACCAGCATGTCTTCAGTAGCCAAACTACTTCTTGAGCATAGATAGGTATA
GTGGGTTTGCTTGAGGTGGTAAGGCTTTGCTGGACCCTGTTGCAGGCAAAAGGAGTAATTGATTTAAAGT
ACTGTTAATGATGATAATGATTTTTTTTTTAAACTCATATATTGGGATTTTCACCAAAATAATGCTTTTG
AAAAAAAGAAAAAAAAAACGGATATATTGAGAATCAAAGTAGAAGTTTTAGGAATGCAAAATAAGTCATC
TTGCATACAGGGAGTGGTTAAGTAAGGTTTCATCACCCCTTTAGCACTGCTTTTCTGAAGACTTCAGTTT
TGTTAAGGAGATTTAGTTTTACTGCTTTGACTGGTGGGTCTCTAGAAGCAAAACTGAGTGATAACTCATG
AGAAGTACTGATAGGACCTTTATCTGGATATGGTCCTATAGGTTATTCTGAAATAAAGATAAACATTTCT
AAGTGATTGTATGAGATTAATTTTGTCATTTACTTTCATATAAAAGTCAAATTTGAAAAACA
SEQ ID NO: 4 is the nucleotide sequence encoding mouse RRM1, isoform 1.
NCBI-GeneID: 20133
SEQ ID NO: 5 is the amino acid sequence for mouse RRM1, isoform 1.
>NP_033129.2 ribonucleoside-diphosphate reductase large subunit
[Mus musculus]
MHVIKRDGRQERVMFDKITSRIQKLCYGLNMDFVDPAQITMKVIQGLYSGVTTVELDTLAAETAATLTTK
HPDYAILAARIAVSNLHKETKKVFSDVMEDLYNYINPHNGRHSPMVASSTLDIVMANKDRLNSAITYDRD
FSYNYFGFKTLERSYLLKINGKVAERPQHMLMRVSVGIHKEDIDAAIETYNLLSEKWFTHASPTLFNAGT
NRPQLSSCFLLSMKDDSIEGIYDTLKQCALISKSAGGIGVAVSCIRATGSYIAGTNGNSNGLVPMLRVYN
NTARYVDQGGNKRPGAFAIYLEPWHLDIFEFLDLKKNTGKEEQRARDLFFALWIPDLFMKRVETNQDWSL
MCPNECPGLDEVWGEEFEKLYESYEKQGRVRKVVKAQQLWYAIIESQTETGTPYMLYKDSCNRKSNQQNL
GTIKCSNLCTEIVEYTSKDEVAVCNLASLALNMYVTPEHTYDFEKLAEVTKVIVRNLNKIIDINYYPIPE
AHLSNKRHRPIGIGVQGLADAFILMRYPFESPEAQLLNKQIFETIYYGALEASCELAKEYGPYETYEGSP
VSKGILQYDMWNVAPTDLWDWKPLKEKIAKYGIRNSLLIAPMPTASTAQILGNNESIEPYTSNIYTRRVL
SGEFQIVNPHLLKDLTERGLWNEEMKNQIIACNGSIQSIPEIPDDLKQLYKTVWEISQKTVLKMAAERGA
FIDQSQSLNIHIAEPNYGKLTSMHFYGWKQGLKTGMYYLRTRPAANPIQFTLNKEKLKDKEKALKEEEEK
ERNTAAMVCSLENREECLMCGS
SEQ ID NO: 6 is the mRNA sequence for mouse RRM1, isoform 1.
>NM_009103.3 Mus musculus ribonucleotide reductase M1 (Rrm1), mRNA
TCAATATGGCGGCCAAGGGACTCGTGTGCTGTCTGTCTACTGCTCAGTTTCCGCCCATTCAACTCCCGGC
GTTGAAACGTCAAGAACGTCATTCGAATTCCGTCCGTCGCGTTGCTCTGCACGTCACGGGTGGCGGGAGC
GGGAAGGAGTTCGTAATTCGGTTAGTCTGCTCTGGTGAGGAAAGTGCTGTCTATCGCGCAGCTTCCATCC
CTCCGTCCGAGCAGCCTCTCGGAGTCCAACCCTTCACATCTGACAGTCGTCTCTGTCCCTTCTTCGCCTC
GGAGCTGCTAACTGGTCTCGAACCTCTCAGCACTTCAGCTTCTAGCGGCGATGCATGTGATCAAGCGAGA
TGGCCGCCAAGAGCGAGTTATGTTTGACAAAATTACATCACGAATCCAGAAACTCTGTTATGGACTCAAC
ATGGACTTTGTTGATCCTGCTCAGATCACCATGAAAGTAATCCAAGGCCTATATAGTGGGGTCACCACAG
TGGAACTGGACACCCTGGCTGCTGAGACAGCCGCGACCTTGACCACGAAGCACCCTGACTATGCCATCCT
GGCAGCAAGGATAGCCGTCTCTAACTTGCACAAAGAAACAAAGAAAGTGTTCAGTGATGTGATGGAGGAT
CTCTACAACTACATAAATCCGCACAACGGCAGACACTCTCCCATGGTGGCCAGCTCAACACTCGACATTG
TTATGGCCAATAAGGATCGCCTGAATTCTGCCATTATCTATGACCGAGATTTCTCTTATAACTACTTTGG
CTTTAAGACACTGGAACGGTCATATTTGTTGAAGATCAATGGTAAAGTGGCTGAAAGACCACAGCATATG
TTGATGAGGGTTTCTGTGGGGATTCACAAAGAAGATATTGATGCTGCAATTGAAACCTACAACCTACTTT
CTGAGAAGTGGTTCACTCATGCCTCTCCTACTCTCTTCAATGCTGGGACCAACCGCCCACAGCTGTCTAG
CTGTTTCCTCTTGAGTATGAAAGATGACAGCATTGAAGGAATTTATGATACTCTGAAGCAGTGTGCCTTG
ATTTCTAAGTCCGCTGGGGGAATTGGTGTTGCTGTGAGTTGTATTCGGGCCACTGGTAGCTACATCGCTG
GGACTAATGGCAATTCTAATGGCCTTGTGCCAATGCTGAGAGTATATAACAACACAGCTCGCTATGTGGA
TCAAGGTGGAAACAAGCGCCCAGGCGCGTTTGCTATTTACCTGGAGCCTTGGCACTTAGACATCTTTGAG
TTCCTTGACTTGAAGAAGAACACAGGCAAGGAAGAACAGCGAGCACGCGATCTCTTCTTTGCACTTTGGA
TCCCAGATCTCTTCATGAAGCGAGTGGAGACTAACCAGGACTGGTCATTGATGTGTCCCAATGAGTGTCC
TGGTCTGGACGAGGTCTGGGGAGAGGAGTTTGAGAAGTTATATGAAAGTTACGAGAAGCAGGGTCGTGTC
CGAAAAGTTGTAAAAGCTCAGCAGCTTTGGTATGCCATCATTGAGTCCCAGACGGAGACCGGTACCCCAT
ACATGCTCTACAAAGATTCCTGTAACCGGAAGAGCAACCAGCAGAACCTGGGAACCATCAAATGCAGCAA
CCTGTGTACAGAAATAGTAGAGTACACCAGTAAAGATGAGGTTGCAGTTTGTAACTTGGCTTCTCTGGCT
CTGAATATGTATGTCACACCGGAACATACGTATGACTTTGAGAAACTGGCAGAAGTCACTAAAGTCATTG
TCCGAAATCTGAATAAAATAATTGATATAAACTACTACCCTATTCCAGAGGCACACTTATCAAATAAACG
CCATCGGCCCATTGGAATTGGGGTACAAGGTTTAGCAGATGCTTTCATCCTGATGAGATACCCCTTTGAG
AGCCCAGAAGCCCAGTTATTAAATAAGCAGATCTTTGAAACCATTTACTATGGAGCCCTGGAAGCCAGCT
GTGAACTAGCCAAGGAGTATGGCCCCTATGAAACGTATGAGGGATCTCCAGTCAGCAAGGGTATTCTTCA
GTATGACATGTGGAATGTTGCTCCTACAGACCTGTGGGACTGGAAGCCTCTCAAGGAGAAGATTGCAAAG
TATGGTATAAGGAACAGTTTACTTATTGCCCCAATGCCTACTGCTTCAACTGCCCAGATTCTGGGGAATA
ATGAGTCCATTGAGCCTTATACCAGTAACATCTACACTCGAAGAGTCTTGTCAGGGGAATTTCAGATTGT
GAATCCTCACTTACTGAAAGATCTTACTGAGCGGGGCTTGTGGAATGAAGAGATGAAAAATCAGATTATT
GCATGCAATGGCTCCATTCAGAGCATACCAGAAATTCCTGATGACCTGAAGCAACTCTATAAGACCGTGT
GGGAAATCTCTCAGAAGACTGTTCTCAAGATGGCAGCCGAGAGAGGTGCTTTCATCGATCAGAGCCAGTC
TTTAAACATCCATATTGCTGAGCCCAACTACGGCAAACTCACTAGTATGCACTTCTACGGTTGGAAGCAG
GGTTTAAAGACTGGAATGTATTACTTAAGGACGAGGCCTGCCGCTAATCCAATCCAGTTCACTCTGAACA
AGGAAAAACTGAAAGATAAGGAAAAGGCACTGAAGGAGGAGGAGGAGAAGGAGAGGAACACAGCAGCCAT
GGTGTGCTCTTTGGAGAACAGAGAGGAGTGCCTGATGTGTGGATCCTGAGAAAATCAGGGCCTGGGAGAC
GCAGCGGGCTCTCCTGCCCGCCGAGGCAGACGATTTGAGCATAGATAGGATAGTGGGTTTGCTTGGTTAT
CAGCAGCTCTGCTTGGACGTGCCTGCCAGGACAGGGAGCCACGACTTACAGTACTGTTTCTACACAGTGT
AAATATCATTTTTAACAAACAGAAAACCAAAGCCAGCTTTGATATTAGGAATCAAAGTAGAGGCTTTGGG
AATACTAAAGAGCCTTCCTGCAAATTAGTGAGGAGACTTAGGAAGTCTCGTCTCTCCAGCTTTCCCTGCC
TGGCCATTCTCAGTTTGGGCAAAGAGATTTAGTTTGATTTGACTGATTGCCTAGAAGTAAAATCAAGCAA
TTACTCATCAGCTAAAGACCTTTGTCTAGACAAACTTCTATAGGTCATTTTGAAATAAACATTTCTAAGT
GATTGTGTGGTACTAAACTTGTCATCTATTATCATACAAGACAGTTTAGGGGAAAAAACCCAAAAACCCA
ACATTTTCTGTTGAGTTCAGAGAGACAAACTTTAAAGACATTTAGATTGTATAGATATCTAGTGTTAACA
TATGCCCTTTCCTGCCCCAGGATGAAATCTTGTTAACATAAAATTGACAGTTTCTTTCATTTATAATTTG
ATTCTGTGGCATTTAGTTCATTCACACTGTTGTATAAACTGTCATCCACACCATTTCCAAAACATTCCAT
CATTCCAAATAGAGACTCTACTCATAACCACACTTCTTACACCTTTTTGAATATGTATTCCTCATACACA
TAATGCAGTATTTGCACTTGTATGGCTTGCATGATATCTAGATACATCACAGTGTGATACGCTGTCCCTC
CATATGTGCACACCATCTTGTATCCATCCTGTCATCTGTTCATGAAACTTGGTTGTTTCCTCCCTTTAGA
TAGGGAGAATAATGGCTGCCATGAACATTGGTCTACAAATATCTATTGGATTCCTGCTTTTAGGTTTGGT
GGTTCTATACAGCAAAGAATTGCTGGACTATATAATTCTGTTTGACTTTGAGGAGCTATATTTGCAGCAC
CATTATATTTCTATAAAAGTACTAAAAGGCCTTATTCTGTCTTCATACCTTATAACACTCGATTTTCATA
TTTTTGATAAAGCCCTTCTATGAGTGGGGAATTTCCTGGTCTTGTAGATTGACTTGTTTCGTTAAACCCG
AGTTTTGGGGCATTTTCTCCCTTTAGTCATCACATCCTTTTTTTCCCTTATGAAACTCATAATAAATCTG
CTTTACG
SEQ ID NO: 7 is the nucleotide sequence encoding rat RRM1, isoform 1.
NCBI GeneID: 685579
SEQ ID NO: 8 is the amino acid sequence for rat RRM1, isoform 1.
>NP_001013254.1 ribonucleoside-diphosphate reductase large subunit
[Rattus norvegicus]
MHVIKRDGRQERVMFDKITSRIQKLCYGLNMDFVDPAQITMKVIQGLYSGVTTVELDTLAAETAATLTTK
HPDYAILAARIAVSNLHKETKKVFSDVMEDLYNYINPHNGRHSPMVASSTLEIVMAHKDRLNSAITYDRD
FSYNYFGFKTLERSYLLKINGKVAERPQHMLMRVSVGIHKEDIDAAIETYNLLSEKWFTHASPTLFNAGT
NRPQLSSCFLLSMKDDSIEGIYDTLKQCALISKSAGGIGVAVSCIRATGSYIAGTNGNSNGLVPMLRVYN
NTARYVDQGGNKRPGAFAIYLEPWHLDIFEFLDLKKNTGKEEQRARDLFFALWIPDLFMKRVETNQDWSL
MCPNECPGLDEVWGEEFEKLYESYEKQGRVRKVVKAQQLWYAIIESQTETGTPYMLYKDSCNRKSNQQNL
GTIKCSNLCTEIVEYTSKDEVAVCNLASLALNMYVTPEHTYDFEKLAEVTKVIVRNLNKIIDINYYPIPE
AHLSNKRHRPIGIGVQGLADAFILMRYPFESPEAQLLNKQIFETIYYGALEASCDLAKEYGPYETYEGSP
VSKGILQYDMWNVTPTDLWDWKLLKEKIAKYGIRNSLLIAPMPTASTAQILGNNESIEPYTSNIYTRRVL
SGEFQIVNPHLLKDLTERGLWNEEMKNQIIACNGSIQSIPEIPEDLKQLYKTVWEISQKTVLKMAAERGA
FIDQSQSLNIHIAEPNYGKLTSMHFYGWKQGLKTGMYYLRTRPAANPIQFTLNKEKLKDKEKALKEEEEK
ERNTAAMVCSLENREECLMCGS
SEQ ID NO: 9 is the mRNA sequence for rat RRM1, isoform 1.
>NM_001013236.1 Rattus norvegicus ribonucleotide reductase catalytic
subunit M1 (Rrm1), mRNA
CGGGTGGCGGGAGCGGGAAGGAGTTCGTAATTTGGTTCGTCCCTTCTGGAGGAGAAAGTGCTGTCTGTCC
GGCAGTTTCAACCTCTCGGTCTGAGCGGCCCCTAAGGAGTCCAACCCTTCACATCTGACAGTCGTCTCTA
TCCTATCTTCGCCTCGGAGCTGCTAACTGGTCTCGAACCCCTCAGCACTTCAGCTTCTAGCGGCGATGCA
TGTGATCAAGCGAGATGGCCGCCAAGAGCGAGTTATGTTTGACAAAATTACATCCCGAATCCAGAAACTC
TGTTATGGACTCAATATGGACTTTGTGGATCCTGCTCAGATCACCATGAAAGTAATCCAAGGCCTATACA
GTGGGGTCACCACAGTGGAACTGGACACCCTGGCTGCTGAGACAGCTGCCACCTTGACTACGAAGCACCC
TGACTATGCCATCCTGGCAGCAAGGATCGCTGTCTCTAACTTGCACAAGGAAACAAAGAAAGTGTTCAGT
GACGTGATGGAGGATCTCTACAACTACATAAATCCACACAACGGCAGACATTCTCCCATGGTGGCCAGCT
CAACACTCGAGATTGTTATGGCCCATAAGGATCGCCTGAATTCTGCCATTATCTATGACCGGGATTTCTC
TTACAACTACTTTGGTTTTAAGACACTGGAACGGTCATATTTGTTGAAGATCAATGGAAAAGTGGCTGAA
AGACCACAGCACATGTTGATGAGGGTATCTGTGGGGATTCACAAAGAAGATATTGATGCTGCAATTGAAA
CATACAATCTACTTTCTGAGAAGTGGTTTACTCACGCCTCTCCGACTCTCTTCAATGCTGGGACCAACCG
CCCACAGTTGTCCAGCTGTTTCCTCTTGAGTATGAAAGATGACAGCATTGAGGGGATTTATGATACTCTG
AAGCAGTGTGCCTTGATTTCTAAGTCTGCTGGAGGAATTGGTGTTGCCGTGAGTTGTATTCGGGCCACTG
GCAGCTACATTGCTGGGACTAATGGCAATTCTAATGGCCTTGTGCCAATGCTGAGAGTCTATAACAACAC
AGCTCGTTATGTGGATCAAGGTGGAAACAAGCGCCCAGGGGCATTTGCTATTTACCTGGAGCCTTGGCAC
CTGGACATCTTTGAGTTTCTTGACTTGAAGAAGAACACAGGCAAGGAAGAACAGCGCGCGCGGGATCTCT
TCTTTGCACTGTGGATCCCAGATCTCTTCATGAAGCGAGTGGAGACCAACCAGGACTGGTCACTGATGTG
TCCCAATGAGTGTCCTGGTCTGGACGAGGTCTGGGGAGAGGAGTTTGAGAAGTTATATGAAAGTTACGAG
AAGCAGGGCCGTGTCCGAAAAGTTGTGAAGGCTCAGCAGCTTTGGTACGCCATCATTGAGTCTCAGACGG
AGACGGGCACCCCATACATGCTCTACAAAGACTCCTGTAACCGGAAGAGCAACCAGCAGAACCTGGGAAC
CATCAAGTGCAGCAACCTGTGCACAGAGATAGTAGAGTACACCAGTAAAGATGAGGTTGCGGTTTGTAAC
TTGGCTTCTCTGGCTCTGAACATGTATGTCACACCAGAACACACGTATGACTTTGAGAAACTGGCAGAAG
TCACTAAAGTCATTGTCCGAAATCTGAATAAAATAATTGATATAAACTACTATCCTATTCCAGAGGCACA
CTTATCAAATAAACGCCATCGGCCCATTGGAATTGGGGTACAAGGTCTAGCAGATGCTTTCATCCTGATG
AGGTATCCCTTTGAGAGCCCAGAAGCCCAGCTACTAAATAAGCAAATCTTTGAAACCATCTATTATGGAG
CCCTGGAAGCCAGCTGTGACCTAGCCAAGGAGTATGGCCCCTACGAAACGTATGAGGGATCTCCAGTCAG
CAAGGGTATTCTTCAGTATGATATGTGGAATGTTACTCCTACAGACCTGTGGGACTGGAAGCTTCTCAAG
GAGAAGATTGCAAAGTACGGTATAAGAAACAGTTTACTTATTGCCCCAATGCCTACTGCTTCAACTGCTC
AGATTCTGGGGAATAATGAGTCCATTGAGCCTTACACCAGTAACATCTACACTCGCAGAGTCTTGTCAGG
AGAATTTCAGATTGTGAATCCTCACTTACTGAAAGATCTTACTGAGCGGGGCTTGTGGAATGAAGAGATG
AAAAATCAGATTATTGCCTGCAATGGCTCCATTCAGAGCATACCAGAAATTCCTGAGGACCTGAAGCAGC
TCTATAAGACCGTGTGGGAAATCTCTCAGAAGACTGTTCTCAAGATGGCAGCCGAGAGAGGTGCTTTCAT
CGATCAAAGCCAGTCTTTAAACATCCATATCGCTGAGCCCAACTATGGCAAACTCACTAGTATGCACTTC
TACGGTTGGAAGCAGGGTTTAAAGACTGGGATGTATTATTTAAGGACAAGACCTGCCGCTAATCCAATCC
AGTTCACTCTGAACAAGGAAAAGCTGAAAGATAAGGAAAAGGCACTGAAGGAGGAAGAAGAGAAGGAGAG
GAACACAGCAGCCATGGTGTGCTCTTTGGAGAACAGAGAGGAGTGTCTGATGTGTGGATCCTGAGACAAG
GCCTAGAAGAGCCAGCGTCTTTCCGCCATAGCAGACCATGTGACATAGATAGGCATAGTGGGTTTGCTTG
ATTAAGGGAAAGCTTTGCCGGACATTTCTGCCAGGAGAAGAATCCTTGATTTGCAGTACTGTTTCTCTAT
AGTGTAAAGGTCATTTTAAACAAAACAAAAAACCAAAGCCAGCTTTGATATTAGGAATCAAAGTACAGGT
TTTGGGAATGCAGAAGAGCCTTCCTGGAAATAGTGATGTTGTTTAGGAAGTCTCTTCTCCCTCCAGCTTT
CCCTGTCTGACTGTCTCAGTTTGGGCAAAGAGCTTTAGTTCGCTTTGACCGATGGCCTAGAAGTAAAATC
AAGCAATAAGTCACCAGCTGGAGATCTAGACAAACTTCCATAGTTGTTTTGAAATAAAAATTTCTAAGTG
AAAAAAAAAAAAAAAAAAAAAAAAAAAA
SEQ ID NO: 10 is the nucleotide sequence encoding canine RRM1, isoform 1.
NCBI Gene ID: 476823
SEQ ID NO: 11 is the amino acid sequence for canine RRM1, isoform 1.
>XP_534027.2 ribonucleoside-diphosphate reductase large subunit [Canis
lupus familiaris]
MHVIKRDGRQERVMFDKITSRIQKLCYGLNMDFVDPAQITMKVIQGLYSGVTTVELDTLAAETAATLTTK
HPDYAILAARIAVSNLHKETKKVFSDVMEDLYNYINPHNGRHSPMVAKSTLDIVLANKDRLNSAITYDRD
FSYNYFGFKTLERSYLLKINGKVAERPQHMLMRVSVGIHEEDIDAAIETYNLLSEKWFTHASPTLFNAGT
NRPQLSSCFLLSMKDDSIEGIYDTLKQCALISKSAGGIGVAVSCIRATGSYIAGTNGNSNGLVPMLRVYN
NTARYVDQGGNKRPGAFAIYLEPWHLDIFEFLDLKKNTGKEEQRARDLFFALWIPDLFMKRVETNQDWSL
MCPNECPGLDEVWGEEFEKLYESYEKQGRVRKVVKAQQLWYAIIESQTETGTPYMLYKDSCNRKSNQQNL
GTIKCSNLCTEIVEYTSKDEVAVCNLASLALNMYVTSEHTYDFKKLAEVTKVIVRNLNKIIDINYYPVPE
ACLSNKRHRPIGIGVQGLADAFILMRYPFESPEAQLLNKQIFETIYYGALEASCDLAKEHGPYETYEGSP
VSRGILQYDMWNVTPTELWDWKLLKEKIAKYGVRNSLLIAPMPTASTAQILGNNESIEPYTSNIYTRRVL
SGEFQIVNPHLLKDLTERGLWNEEMKNQIIACNGSIQSIPEIPDDLKQLYKTVWEISQKIVLKMAAERGA
FIDQSQSLNIHIAEPNYGKLTSMHFYGWKQGLKTGMYYLRTRPAANPIQFTLNKEKLKDKEKATKEEEEK
ERNTAAMVCSLENREECLMCGS
SEQ ID NO: 12 is the mRNA sequence for canine RRM1, isoform 1
>XM_534027.6 PREDICTED: Canis lupus familiaris ribonucleotide reductase
catalytic subunit M1 (RRM1), mRNA
CGAGGCGCTGGCGGCGTCGGGTAACGTCATTCGAGCTCCGTCGCGCCGCTTTTGCGCGGCTTTTGCGTCT
CGGGTGGCGGGAGCGGGAAGGGGATTCGGATTGTCGCGCCTCCGCTCGGTGGAGGAAAGTGCCCTCTGGC
CCCCAAATCAGTCCTTGCACCTGAGCACCCCCGGGAACCGGACCCTTCGCACTCTACCTACCACCTTCTC
GATCCCGCCGGCGCCTCGGAATTGCAGCCCCGTCTCGATTCCCTCAGCGCCTCAGCCACTAGCCGCGATG
CACGTGATCAAGCGAGATGGCCGCCAAGAGCGGGTTATGTTTGACAAAATTACATCTCGAATCCAGAAGC
TATGTTATGGACTTAATATGGATTTTGTTGATCCTGCTCAGATCACCATGAAAGTAATCCAAGGCTTATA
CAGTGGGGTCACTACTGTGGAACTGGATACTTTGGCTGCTGAGACAGCTGCAACCTTGACGACTAAGCAT
CCTGACTATGCCATCCTGGCAGCAAGGATTGCCGTCTCCAACTTGCACAAAGAAACAAAGAAAGTGTTCA
GTGATGTGATGGAAGATCTCTACAATTACATAAATCCACATAATGGCAGACATTCTCCCATGGTGGCCAA
GTCAACACTGGATATTGTTTTGGCCAATAAAGATCGCCTGAACTCTGCCATTATCTATGACCGAGATTTC
TCTTACAATTACTTTGGATTTAAGACACTGGAGCGGTCCTATTTGTTGAAGATCAATGGAAAAGTGGCAG
AAAGACCACAACATATGTTGATGAGAGTGTCTGTGGGGATTCACGAAGAAGATATTGATGCTGCTATTGA
AACATACAACCTTCTTTCTGAGAAGTGGTTTACCCATGCCTCTCCCACTCTGTTTAATGCTGGTACCAAC
CGCCCACAGCTTTCTAGCTGTTTCCTTCTGAGTATGAAAGATGATAGTATTGAAGGCATTTATGACACTC
TAAAGCAGTGTGCATTGATTTCCAAGTCTGCTGGAGGAATTGGTGTTGCTGTGAGTTGCATTCGAGCTAC
TGGCAGCTACATTGCTGGGACTAACGGCAACTCCAATGGCCTTGTACCAATGCTGAGAGTATATAACAAC
ACAGCTCGATATGTGGATCAAGGTGGAAACAAGCGACCTGGGGCATTTGCTATTTACCTGGAACCTTGGC
ATTTAGACATTTTTGAGTTTCTTGATTTAAAGAAGAACACGGGAAAGGAAGAACAGCGTGCCAGGGACCT
TTTCTTTGCTCTTTGGATTCCAGATCTGTTCATGAAACGAGTGGAGACTAATCAGGACTGGTCTTTGATG
TGTCCAAATGAATGTCCTGGATTGGATGAGGTTTGGGGAGAGGAATTTGAAAAGCTATATGAAAGTTATG
AGAAACAGGGTCGTGTCCGCAAAGTTGTAAAAGCTCAACAGCTTTGGTATGCCATCATTGAGTCTCAGAC
AGAGACAGGTACCCCGTACATGCTCTACAAAGATTCCTGTAATCGGAAAAGCAACCAGCAGAACTTGGGA
ACGATCAAATGCAGCAACCTGTGCACAGAAATAGTAGAGTATACCAGCAAAGATGAGGTTGCAGTCTGTA
ACTTGGCTTCCCTGGCCCTGAATATGTATGTTACATCAGAACACACATACGATTTTAAGAAGCTGGCTGA
AGTCACCAAAGTCATTGTCCGAAACTTGAATAAAATTATTGATATTAACTATTACCCTGTCCCAGAGGCA
TGCTTATCAAATAAACGCCATCGCCCCATTGGAATTGGGGTACAAGGTCTGGCAGATGCTTTTATTCTGA
TGAGGTATCCTTTTGAGAGTCCAGAAGCCCAGCTACTGAATAAGCAAATCTTTGAAACCATTTATTATGG
AGCCTTGGAGGCCAGCTGTGACCTGGCCAAGGAGCATGGGCCATATGAAACCTATGAAGGTTCTCCAGTC
AGCAGAGGAATCCTTCAGTATGATATGTGGAATGTTACTCCCACAGAACTATGGGACTGGAAACTTCTCA
AGGAAAAGATTGCAAAGTATGGTGTAAGAAACAGTTTACTTATTGCCCCAATGCCTACTGCTTCAACTGC
TCAGATTCTGGGAAATAATGAGTCCATTGAACCTTATACCAGCAACATCTATACTCGAAGAGTCTTATCA
GGAGAATTTCAGATTGTGAATCCTCACTTACTAAAGGATCTTACTGAGCGGGGCTTGTGGAATGAAGAGA
TGAAAAATCAGATTATTGCATGCAATGGTTCTATCCAGAGCATTCCAGAAATCCCTGATGACCTGAAGCA
ACTTTATAAGACTGTGTGGGAAATTTCCCAGAAAATCGTTCTTAAGATGGCAGCTGAAAGAGGCGCTTTC
ATTGATCAAAGCCAGTCTTTGAACATCCACATTGCTGAGCCTAACTATGGCAAACTCACCAGTATGCACT
TCTATGGCTGGAAGCAGGGTTTGAAGACTGGGATGTATTACTTAAGGACACGACCAGCAGCAAATCCAAT
CCAGTTCACTCTAAATAAGGAGAAGCTGAAAGATAAGGAGAAGGCAACAAAAGAAGAAGAAGAGAAGGAA
AGGAACACAGCAGCCATGGTGTGCTCTTTGGAGAATAGAGAGGAGTGTCTGATGTGTGGGTCCTGAGGAA
AGGCTTAGAAGAGACCAGCACTTCTTCACAGACAAACTACTTCTTGAGCATAGATAGGCATTGTAGGTTT
GTTTGAAGTGCTAAGGCTTTGCTGGATCTCATTGCAGCAAAAGGATCAGTCAATTTAAGGATCAGTCAAT
TTAAAGTACTGTTTCTATATAGTGTGAAAGTATTGATTTTAAAAATTGGTATTTTGGGAATCAAAGTAGA
AGTTTTAGGAGTGCAAAACAAGTCACCTTGCAAATAAGGAATGATTGAGTAGGGTTTCATTGCCCACCTG
GCACCCCTTTTCTGGTGACCTCAGTTTTCATAAGGAGACATGGTTTTGCTGCTTTGACTGGTGAGTCCAT
AGACGCAAAACTGAGTCCTAACCTGTGAGAAGTGCTGATAGGACCTTTCTCTGGATAAGGTCCTATAGGT
CATTCTGAAATAAACATTTCTAAGTGATTGTGTGAGA
SEQ ID NO: 13 is the nucleic acid sequence for human RRM2, isoform 2.
>NC_000002.12:10122568-10211010 Homo sapiens chromosome 2, GRCh38.p13
Primary Assembly
AAAATCGCGCGCGGCCCCGCGGCCAGCCTGGGTAGGGGCAAGGCGCAGCCAATGGGAAGGGTCGGAGGCA
TGGCACAGCCAATGGGAAGGGCCGGGGCACCAAAGCCAATGGGAAGGGCCGGGAGCGCGCGGCGCGGGAG
ATTTAAAGGCTGCTGGAGTGAGGGGTCGCCCGTGCACCCTGTCCCAGCCGTCCTGTCCTGGCTGCTCGCT
CTGCTTCGCTGCGCCTCCACTATGCTCTCCCTCCGTGTCCCGCTCGCGCCCATCACGGACCCGCAGCAGC
TGCAGCTCTCGCCGCTGAAGGGGCTCAGCTTGGTCGACAAGGAGAACACGGTGAGCCCGCGGGGAGGGCG
CTGCGGGCAGGGGAGGGAGGCAGGGAAAGCGAAGCCGCTCCTCACTCACACGCGTCTCCCCGCAGCCGCC
GGCCCTGAGCGGGACCCGCGTCCTGGCCAGCAAGACCGCGAGGAGGATCTTCCAGGAGCCCACGGAGCCG
GTGAGTGGCGGGCGTGGGGCAGAGGGGCCAGGGACGGCCTTGGGCGTCTTGGCGCCAAAGCCGCATTGTT
TCCTCAGCTGTTCACACTCCCGCCCCGGCTCCTTTCCCGCCTAGGCGGCCCCTCCCCAGGGCTGCCTCCC
GCGCCCCTCGGCCCATTTCCCGGTTCGGGCGTGCGCTCCTCTGCTGCGACCCACGGAGTGCGACGGGACA
GCCACGTTTTCACATCGGGCCCCGTGAAATTGCCGCCAATGGAAAGGACTTGGTCCAGAAAAACGTTAGT
TTCATATGGTTCGCCCGGTACTTAAATGTTTTATTTTCTCCCCCAACAGAAAACTAAAGCAGCTGCCCCC
GGCGTGGAGGATGAGCCGCTGCTGAGAGAAAACCCCCGCCGCTTTGTCATCTTCCCCATCGAGTACCATG
ATATCTGGCAGATGTATAAGAAGGCAGAGGCTTCCTTTTGGACCGCCGAGGAGGTAATCGGAGGACCCCA
GAAGACCCCTGCAGGGGTGACCGTCACGCCTCAGACATAAATGCACTTGGAGGTTCCCGTTGGCAAGGGG
GGCTAACTGTGGGGCATAGTAAGTGGTGCCAGCATACTTAAAGTTTGAGTGCTCAGTGTGAGTCCTGTAG
GCTTTACTCTCTTCCTTTTATGCTAAAATTGTGACTTCCGAACCTCAGGTGGACCTCTCCAAGGACATTC
AGCACTGGGAATCCCTGAAACCCGAGGAGAGATATTTTATATCCCATGTTCTGGCTTTCTTTGCAGCAAG
CGATGGCATAGTAAATGAAAACTTGGTGAGTTTCCAAAACATCTTTCATTCATTTGACGTTGACGATCTG
AGGTCGAACTAGTTCGCTTTCCTCGTCTTGTATGTTTTTCCATGCTGAGTGCATCTGTGTGTGTAAGCTG
GGTTTTATATTACATGGCATTTCCTGTTTTGTAACACTTTGCAGTTCTTTCTTATGGTATTTTCCCGACT
CTAGAGAAGCTGAGACAATATTAAGTGGTAGCAATGTGATGACTCTTTGTGGCCACCACATCTGCCCCCT
CTTTTTTTTTTTTTTTTTGAGACAGAGTCTCACTCTGGCCCAGGCTGGAGTGCAGTGGTGTGATCTTGGC
TCACTGCAACCTCCGCCTCCTGGGTTCAAGCGATTCCCCAACCTCAGCCTCATGAGTACCTGGGATTACA
GACGTGCGCCACCATGCCTAGCTAATATCTGTATTTTTAGTAGAGACAGGGTTTTACCATGTTGGCCAGG
CTGGTCTCGAACTGCTGACCTCAGGTGATCCACCCACCTTGGCCTCCCAAAGTGTTGGGATTACAGGCGT
GAGCCACCACGCCCGGCTCTGCTCCCTCCTTTTTGTGGCTTTGCTGTTTTAATAATAATTTGGTTGTATC
TCTTATTGCGAATGGATCTTTCTTGACATAAATTAATTAGGAAATCGAGCGCTCACAAATCCTATTTTAT
ATGTATCTATTTCCTGATATGTAAGTTGAGCATATGACATAAAATATCAAAGAATTGTGACAAATTGGAT
GAAATATATATAGAAATAAACCTTATAATGGTACAAAGAGTGCGATGCTGCCAGTATCCGTTGACAGTTG
CTGCTGTTGGTTTTTTCTCAAGCTTAACTTTGATGTGTTTTGCCACTAGGTGGAGCGATTTAGCCAAGAA
GTTCAGATTACAGAAGCCCGCTGTTTCTATGGCTTCCAAATTGCCATGGAAAACATACATTCTGAAATGT
ATAGTCTTCTTATTGACACTTACATAAAAGATCCCAAAGAAAGGTGAGTATTCAAGTGGTATGCCAAGAT
TTTTAGGACTCACTAATTGTTGATTTATTACACATTTTTAGTTCACCTAGGGATAAAAATGACTCCAGAA
TGACTAAGACAGTCATAGGCATTCCCAGCACCCGTGGTCATGTCTGCTCTTAGCAAGGGGCCTAAATGCA
CTTTATTATTCACTTAGAGTTGTGAAGGTACTCCTTTTAAAGTTGGATGTCTACCAATGTAAAACCTTCT
TTTGAAAAAATTCCTAGATGTTGGGTAAGACAAACTAAAACCTATGTCTGACCATCTTTGCTCATTTGGT
AAAGTTGTTGAGAAGCTAGAATGTGGGGCTGCAGTGGGATGGACGGGGAGGACTTGCCTCCTAAGAAGCC
TGCAGTATAGTATAGGCAAATAAGACTTAGTAGGAGTTACATAAGGCAGAGGCAGCAGTGAACCCTGAGA
CTGATTTAGGCATGCAGGAGTTTGGCTGAATAAAGGTAGCTTAAGGTCTGTTTTGTTTTGGAGATTGGAG
GTGGGGGGATTAGAAATGGGCTGCTGGAGTAGTCTAGATACAAAGGTCAGCTTTAGGGTGGCGCGCGGTG
GTTCTCGCCTGTAATCCCAGCACTTTGGGAGGCTGAAGCGGGCGGACAATGAGGTCAGGAGATCGAGACC
ATCCTGGCTAACACGGTGAAACCCCGTCTCTACTAAAAATAAAAAAAGTGGTGGCGGGCGCCTGTAGTCC
CAGCTGCTTGGGAGGCTGAGACAGGAGAATGGCGTGAACCCGGGAGGCGGAGCTTGCGCTCCAGCCTGGG
TGACAGAGCAAGACTCCGTCTCAAAAAGCAAAACCAAGCAAAAAAAACAAAGGTCAGCTTTGGGGACCAG
AACCTTGTATGGAGTGGAAGTGGTGAAGCTGCAACCTAAAGTAGCCGTTGTAGACTTTGAAGTACATGAA
GAGGAAAAGTGGTAACTTGAAAGGACTGAGGAAACATTGGGAGTAAAGAGATTTGAACATGTTTATAGGT
GGAAATTGAGAAAAGAAGGCAAAGATTAGGGGTACGATCGGGGGCAAATGCCCAGAAGGGGAACAGGAAG
GTCTGCTGGGGAAGCCTCAAAAACAAGGGAGAGGCAGACCCAGGTCTCAGAGAGAGGGACAGTGAGATGG
AAAGAATGAACGACAGCTGGGCATGGTAGTCTGAGCTAGTAGTCCCAGCTACTTGGCAGGCTGAGGCAGA
AGGATGGCTTGAGCCCTGGAGTTTGGTTTTACCGTGAGCTGTGATCATCTCGCTGCACTCTAGCCTGGGC
AACAGAGTGAGACCCTCATCTCTTTAAAAAAAAAAAAAAAAAAAAAAAAAAAAAAGCTGCCCAATGTCTG
GTGCCCTTGGCTTCAGAACACAAAGTCATCTGGGTAGGAACAGTCTGGGAAATGAGTAGCCTCTCAAGGT
GGGCACCAGAATAAAGGGAGGCAGAGGAGGGTGGTAAGGGAGATCCAGTTAACTGTAGTACCCATGGATT
TGCTTTCCTGACCTGGGATCGACAGTGTAGCACAGAGTCCTAGTAGGAAGCAATCTTAGTTTATTGGTTT
AATTATTTTATGATATAGGTGTGGCAACTGAGGCCAAATAATGCACCTAATCATAGTCTGATAATAGCAC
AGCAGTTAGGATTTTATGGTTCTTCAAATTTAAATTCTATGATTCTTCAAATTGAACAATGATCTGGACT
TGAAATAATTTTAAAGGCAACAAATGTCCCTGCTGTACTGGACTATGTTTTACTGTCTGTAGACCCTGAA
GCTCAATATGAACTACAGAATACCCAAACTTGTATTAATGTAAATCAAGTGTTGAGGTTTTTAAAAGAAC
ACTGGAGGGAAAAACTGACCAGTAAAAATAAAACATTTCGGTGTGAGTTCTTCCTTTAGGAAGAGGATTG
GCAAATACTTGAATTTGGCCTTTGTCCCAGAGCTCTTATCTAGCAGTTGGTAATCGGAGGTCTTTTACTG
TAATGCTTCAATTGCTGATACCGTATGTGCCTACTAGGGAATTTCTCTTCAATGCCATTGAAACGATGCC
TTGTGTCAAGAAGAAGGCAGACTGGGCCTTGCGCTGGATTGGGGACAAAGAGGCTACCTATGGTAAGGAG
ACCCTTGCCCCTACTTAAACCTGAGCTTCATTTTCCAAGTAATGTTACTGGATTTTTGGCCCTTGAATAC
CAACTCACTAGAATCATGTTGGTGTTAACTCCTAAATAGGTGAACGTGTTGTAGCCTTTGCTGCAGTGGA
AGGCATTTTCTTTTCCGGTTCTTTTGCGTCGATATTCTGGCTCAAGAAACGAGGACTGATGCCTGGCCTC
ACATTTTCTAATGAACTTATTAGCAGAGATGAGGTGAGTCTAAGTCAAATAATAGGGTGACCTAAACCCC
AAACACAACTCGGGCATGCTCTTGTGTTCACTGACGGGGACCTGAGATGCTAGATGGCATATATCCACAT
TTAATGTGTGAGTTCAACCATACACATACTTGACAAAAGAAGGAAATACTTTCATTTACTGAAACTGTTT
TACTTGCATTCTCAATATATTGTAATACATTTGTACATATGTATTCCCCTATAGGCTTTGAATGCATAAA
ACTACAAGTTCTTTGTTTTTTGAGGTGACGGAATCTTGCTCTGTCGTTCCAGGCTGGAGTGCAATGGCGT
GATCTTGGCTCACTGCAACCTCTGCCTCCTAGGTTCAAGTGATTCTCCCGCCTCAGCCTCCCAAGTAGCT
GGGATTGTAGGTGCCTGCCACCATGCCCAGCTAATTTTCGTCTTTTTATACAGACGGGGTTTCACCATGT
TTGCCAGACTGGGGTTGAACTCCTGACCTCAGGTGATCAGGTGATCCACCCGCCTCGGCCTCCCAGAGTG
CTGGGATTATAGGCATGAGCCACCATGCCCAGCCAAAACTACAAGTTATTGATGGGATTGGGATTTTAAG
GGATGTTTTATTATTTTTGCCTGGTATTAATATGTTATCCCTTTTTCCGTAAAAATGTTCATAGTAGAGC
CAGGAGCGGTGGCTCATGCCTGTAATCCCAGCACTTTGGTAGGCCGAGGCGGGTGGATCATGAGGTCAGG
AGATTGAGACCATCCTGGCTAACACGGTGAAACCCCATCTCTACTAAAAATACAAAAAATTAGCCGGGTA
TGGTGGACGTGCCTATTGTCCCAGCTACTTGAGAGGCTGAGGTAGGAGAATCGCCTGAACCTGGGAGGTG
GAGGTTGCAGTGAGTCAAGATCACACCACTGCACTCCAGCCTGGGTGACAGTCCCCCCGAAAAAGAATGT
TCATAGTAGCCATTATGTTTCTCCTGTTTGATCTAGAAATTGCCCCTCTACTTCAATATTAATAAGCATT
TCAATGAAATGAGTATACATTTTGGTCTAGTGTATGTCTTTGATTAAGTCACATTTGAAAAGCCAGGAGC
ATGAACTCCATCTTACTTGGAGCCCAGTGGGCAAATCAAATATGGTTACCTTGTAGGAGGGCCTTCCTTA
CTGGATTGGGAGATAAGCTGTGAAGCTTGATGTTTAATGCAGTAACTTGCAAACTTGATTTACTTGAAAT
TGCATACAAATTTCCTGAGCATCTAAAAACTAGCCTTATTACTGAGCTTTGCCTTTCCTGCTGGGAGTAG
TGGCAAAATTAGCACTCATGGCTGTAGAAAGATCACTGAGTGAAGCTCTGACTCCTCCTTTGCCAACACA
CAGCAGAGCAAGAAATACACCTTGCCTGTCTTCATCTAGGTGGCAACTTTGAGGGTCTTGAATGGGACTG
AGCTTGCCTTGGTAGTGACATCAGCAGAGAAGTCAGTAGTTGAAGTCATCTTCCCTTTGAGAGTTCAAGT
GCTCTCAGTATGGCTGAGCATGTTGGATAAGGAGAATGCAGAAAAGGACAAAGTAATTTCATATTCCATG
TTAATGACAGAAGTCTTCTGGCTTTAGTGATCTTGAACTTTTTTTTCTAGGGTTTACACTGTGATTTTGC
TTGCCTGATGTTCAAACACCTGGTACACAAACCATCGGAGGAGAGAGTAAGAGAAATAATTATCAATGCT
GTTCGGATAGAACAGGTAAAGTGGGTGATGAAATGGGTCACTCAAGCTTGCTAGAAAATGCCTGTGCTTT
AGTTGTATTCAGAAGCTGTATTTTGGTTCCTAGGAGTTCCTCACTGAGGCCTTGCCTGTGAAGCTCATTG
GGATGAATTGCACTCTAATGAAGCAATACATTGAGTTTGTGGCAGACAGACTTATGCTGGAACTGGGTTT
TAGCAAGGTAAAGTATTGTTTACATAGCCTTTTGCTTGTTTTGAAGCTGGTGCTCTGTATTTATATCTTG
ATGTGAACCTTTTCAGGTTTTCAGAGTAGAGAACCCATTTGACTTTATGGAGAATATTTCACTGGAAGGA
AAGACTAACTTCTTTGAGAAGAGAGTAGGCGAGTATCAGAGGATGGGAGTGATGTCAAGTCCAACAGAGA
ATTCTTTTACCTTGGATGCTGACTTCTAAATGAACTGAAGATGTGCCCTTACTTGGCTGATTTTTTTTTT
CCATCTCATAAGAAAAATCAGCTGAAGTGTTACCAACTAGCCACACCATGAATTGTCCGTAATGTTCATT
AACAGCATCTTTAAAACTGTGTAGCTACCTCACAACCAGTCCTGTCTGTTTATAGTGCTGGTAGTATCAC
CTTTTGCCAGAAGGCCTGGCTGGCTGTGACTTACCATAGCAGTGACAATGGCAGTCTTGGCTTTAAAGTG
AGGGGTGACCCTTTAGTGAGCTTAGCACAGCGGGATTAAACAGTCCTTTAACCAGCACAGCCAGTTAAAA
GATGCAGCCTCACTGCTTCAACGCAGATTTTAATGTTTACTTAAATATAAACCTGGCACTTTACAAACAA
ATAAACATTGTTTGTACTCACAAGGCGATAATAGCTTGATTTATTTGGTTTCTACACCAAATACATTCTC
CTGACCACTAATGGGAGCCAATTCACAATTCACTAAGTGACTAAAGTAAGTTAAACTTGTGTAGACTAAG
CATGTAATTTTTAAGTTTTATTTTAATGAATTAAAATATTTGTTAACCAACTTTAAAGTCAGTCCTGTGT
ATACCTAGATATTAGTCAGTTGGTGCCAGATAGAAGACAGGTTGTGTTTTTATCCTGTGGCTTGTGTAGT
GTCCTGGGATTCTCTGCCCCCTCTGAGTAGAGTGTTGTGGGATAAAGGAATCTCTCAGGGCAAGGAGCTT
CTTAAGTTAAATCACTAGAAATTTAGGGGTGATCTGGGCCTTCATATGTGTGAGAAGCCGTTTCATTTTA
TTTCTCACTGTATTTTCCTCAACGTCTGGTTGATGAGAAAAAATTCTTGAAGAGTTTTCATATGTGGGAG
CTAAGGTAGTATTGTAAAATTTCAAGTCATCCTTAAACAAAATGATCCACCTAAGATCTTGCCCCTGTTA
AGTGGTGAAATCAACTAGAGGTGGTTCCTACAAGTTGTTCATTCTAGTTTTGTTTGGTGTAAGTAGGTTG
TGTGAGTTAATTCATTTATATTTACTATGTCTGTTAAATCAGAAATTTTTTATTATCTATGTTCTTCTAG
ATTTTACCTGTAGTTCATACTTCAGTCACCCAGTGTCTTATTCTGGCATTGTCTAAATCTGAGCATTGTC
TAGGGGGATCTTAAACTTTAGTAGGAAACCATGAGCTGTTAATACAGTTTCCATTCAAATATTAATTTCA
GAATGAAACATAATTTTTTTTTTTTTTTTTGAGATGGAGTCTCGCTCTGTTGCCCAGGCTGGAGTGCAGT
GGCGCGATTTTGGCTCACTGTAACCTCCATCTCCTGGGTTCAAGCAATTCTCCTGTCTCAGCCTCCCTAG
TAGCTGGGACTGCAGGTATGTGCTACCACACCTGGCTAATTTTTGTATTTTTAGTAGAGATGGAGTTTCA
CCATATTGGTCAGGCTGGTCTTGAACTCCTGACCTCAGGTGATCCACCCACCTCGGCCTCCCAAAGTGCT
GGGATTGCAGGCGTGATAAACAAATATTCTTAATAGGGCTACTTTGAATTAATCTGCCTTTATGTTTGGG
AGAAGAAAGCTGAGACATTGCATGAAAGATGATGAGAGATAAATGTTGATCTTTTGGCCCCATTTGTTAA
TTGTATTCAGTATTTGAACGTCGTCCTGTTTATTGTTAGTTTTCTTCATCATTTATTGTATAGACAATTT
TTAAATCTCTGTAATATGATACATTTTCCTATCTTTTAAGTTATTGTTACCTAAAGTTAATCCAGATTAT
ATGGTCCTTATATGTGTACAACATTAAAATGAAAGGCTTTGTCTTGCATTGTGAGGTACAGGCGGAAGTT
GGAATCAGGTTTTAGGATTCTGTCTCTCATTAGCTGAATAATGTGAGGATTAACTTCTGCCAGCTCAGAC
CATTTCCTAATCAGTTGAAAGGGAAACAAGTATTTCAGTCTCAAAATTGAATAATGCACAAGTCTTAAGT
GATTAAAATAAAACTGTTCTTATGTCAGTTTCTTGATTGGTAAAATTTGCATTTTAATTCAGGAAGAGAA
ATATTTTTTGGCCAGGCATGGCTGTAATCCCAGCACTTTGGGAGACCAAGGTAGGCAGATCACCTGAGCT
CAGGAGTTCGAGATCAGCCTGGCCAACATGGTGACACCCCATCTCTACTAAAAATACAAAAATTAGCCTG
GCATGGTGGCACACGCCTGTAATCCCAGCTACTCGTGAGGCTGAGGCAGGAGAATCACTTGAACCCGGGA
GGCAGAGGTTGCAGTGAGCTGAGATTGCACCGCTGCACTCCAGCCTGGGCAGCAGAGTGAGACTGTCTGA
AAAAAAAAGGTGTTTTTTGTAAAGGCTAACGAATTCATTTGCTTTCCACTGGTTCTGGGCAAGAGACTTG
CCTTGTGCCTATTGGCACAAGGTGTATAGGAGACAGGTACACCCGAAAGGTGGTGCCCAAAAATACTAAC
TGCCATACTGCACGTGGGGTTTGTGAAGCCGGGGCTGAGTTAACTTCTCAACCGTGGGGGAGCCACTCCT
GGGGCTCTTTTCCCGTTTGCAAAACAGGTGGGGCTAGAGGTCTTCCCAGCTGGAGTTTTGCTCTGCTGTC
CCACATCTGACCTGTGTGGACTCCAGCACAGGTTTGGATTGGTCCCTGTGTCTATAAAGGCCCTTTCCTG
ACTCGGAATCCCACCCACTTTGATAAAGCCTTTTAGAATTCATGACACCCATCCCCAAACGAACCAATCA
TTCCTTGTACCTCACGCCACTGCCATTCAGTTCATTGAACAAACAGCAGCTCTCTTGTCAGGTGACGTTT
TCTACCTGCATTTTAATTCAGGAAGATGGGGCGCTAAGCCAGAGGGGAGGCCCCTCCCTCTGGAGCTTGG
GTTTACTCCTAGAGAGGAAAACTGATAGATGAGTAGATCTGAATTGTTGGGCAGTGGTGGGGGCAGCAGA
GAATTCTAAGGTGGATGGGAGTGATTGGGAGAGGTCTCATGGGGGGAGATGATGTTTCCTTAGTGGAGGG
GACTGGGACTAGTGTCTGAGGTTGTGCTGCTTCCGACTCCTGTGTTCTCATGAAGATTTCTTCCCGTGCT
GCTCTGTAAGAGAAAGTTGTCTTTGAGGGCACAGATTTTTATCTGTCTTTATATTTATAAGCATAAGGCC
TCCAAGGATCAGGTATTTAAGTGACTGGTACATGGGGAAATAAACTAATTGGAACTGAAGTATTTTGGGG
TGGATGGTATCTTGGGTAAAAGTGTGATCTGTGTCCCAGAGGAACCTAGTAGAGAGCTTTGCCTTTACAC
CTAAAAGTGTTCAGTTAAGGTCATTTGATTTGTAATGTCAGGTTGGCGCTGGGCCTATTGCACAAGTTCG
GGGCAGCCAGGCGTCAAGAAGATGACCAACTACTAGGACAGCCTCCCTGTGGGTGGCCTGCAGTCTGTTC
TGCTCCCCCCGGCCCCATGCCAGCTGCCATGCTCTATAGAACATGTCTCCCATGCTGCCCGAGGAGGGCC
TGCAGAGAGTTGAGTGGTCAGGCTGCTGAGTCAATTGCCCTGGGTACTCATTAGATACATCCTCCCCGGC
CTCACCCCCAGACCTACTGAATCAGTCTGGGGGTAAACCAGGGACCCTGTAATCTTAATGGGAGATCTCA
GACACTTGAGATCGGGTGGGATAGACTCCTGACATAAAGTTCAAACCAGTGGACGTCAGTCCTGGGTGTG
AATTATAATCACCTGGGGGCTTTTAAAAGCTACTAAAGTCTGGATCTCACTTGGGGAAAAGGCAGCCCTG
CTGAGCTTCAGCATGTTCCAGATGTGTTTTCTGGTGTGTTCTAGACATGCTGTGTAAGAGTTACACTTCA
TTGTGTGTGCACATTCGGGGCCCTGCCCAGCTGCAGTGGCCAGGCCTGGCTGCTAAAAGCAGACCTACCA
AAACCTCCCTTCACCTGGTACTGCTGTGGCCTCTGACCTGAGGACTTTGTCATGCAAAGGAGGAACCAGA
TGGGTGTTCTGTCACCTGGCCAGGGAGCTAACTGGCTGTATTTTGAGGATCAGTGGCCCTGCCAGTGTCG
GTCTGGAGATCCTGATAATGGTTTAACTCCTCTTAGCAAGACAGGCACAGGCCCAGCCCCTCATCCGTGA
GTGGCTGCAGTTGGACTGCGTGGCCTGGCCTCTTCCAGCAGTCCCTGAGTATAGAGGGGCTACCCTCCTG
GTGTCTGTCTGGACACAGAAGGGAACACATCAGTGGTGTCTCCCTGCCATTCCCTGGAGGGAATATGACA
TCAGGATTTTTTTTTTTTTTTTTTTTAATGATGAGAATAGCTGAACCCATTGCTGCTTAAGGTTCAGTAG
TCATGTTCACCTTAGCCTTGGCTCTAGAGACTGGAGTGGCTCCAGCAAGGTGGTGGACTAAGGAACCGAA
CTCCTCTTGCTTCAAACACCTGCCCATGATAAATAGCACAGCAAAAAGTTAAATAGGTGGGCCGGGCATG
GTGGCTCGCGCCTGTAATCCCAGCACTTTGGGAGGCTGAGGTGGGCGGATCACCTGAGGTCAGGAGTTTG
AGACCAGCCTGGCCAACATGGTGAGACCCCATCTCTACTAAAAATACAAAATTTAGCCGGGTGTGGTGGC
CCATGTCTGTAATCCCATTACTCCGGAGGCTGAGGCAGGAGAATCACTTGAACCTGGGAGGCAGAGGTTG
TAGTGAGCTGAGATTGCACTCCAGCCTGGGCGACAAGAGTGAAACTCCATCTCAAAAAAAAAAAAAAAAA
AAAAAGTTAAATAGATGATCACCTCCTGGGAAAGGAGAATGACCTCTTTTGGGAACAAAGAAAGTGACCA
TGGAGGCCCCGGAACTTGTAGCAGCTCTCCGAGTGGTTGTTAGTCCCTTAGAGAAATTAAATGGGCAGGG
GCTGACGTGCAATTGGATTTGGAGGGAGAGGTTAATCTAAACCAGGGGAGGAGTTGGGACCAAAACCGTG
GCATAAAGCTAGGGGCCCCAGTGACACGGGAACTAGACAAAAATCCCATTGGCACAGTGGGGAAGATAAG
GGTTTTAATCCTTCTGGATTCTTAAAAACCTTCACATAAATTTGTGGTCTAGGAACTACTCAAAGATAAA
TTAATCCCCAGTATTGATCCCTAGCCTGGTTGCACAGGATTCCCACAGGTGGGGTTCACACTTCTTAATT
AGAAACTCAGACAACACAACAGATAAAAGGAAAAAACACGGTATGGTGAAGAAATAGATTTTCGGAATCA
GGTAGAATGGGATACAGCATAACTACTAGAGTTCAGGCTCTTAGAGCTATTTCAACACAGCTTAGTAAGA
TTAGACATAGCTGAAGAGTGGACTTGTGAGTTGGAAGGGATGTATCTAAGGGAATTATTCTAAAGAAGAT
GAAAGAAAGCATGGAGAGAGTGGACAGGCAGTGTTTGAGGAGGTAAAGACTGGTGACTTTCCAGAATGGA
CTCATCCTTGAGATCAGGAAGTCCCCAAGGAATCACACATGAGAAGCAAACATTCATTCCTAGTCTCATT
TGAATGAAGCTGCAGAACATGAACAAAAAGAACAATCATTAAACGAATGTTTCAACGTAAGCCAAAAGAT
TATGAAATCATATCTTCAATGCTGAGGGAATCATTGGACAAAATTATTATTCAGAAAGAAGATACATTTT
CATGCCAAGGTTTTACCATTCACATCCCCAAGCCAAAATAATTCCTAGCGAATTGAGCCAAAAGAGGATG
GTGATGAGCAGAGAAATTGGTTGGTCCACAGTGAATCAATAGAATCAAAAGGAAGCTGGGCATCATGGTG
CATGCCTGTGATCCCAGCTACTCACGAGGCTGAGGTGGGAGGATCACTTGAGTCCAGCCTGAGCAACAGT
GAGACCGAACTCAAACAACAAATGGAACTAGAATAATGGACGCTGCAGAGGGATAAAGAATACCAAGGTC
TTTATACTATTAGGCCTTGGAGGTATATGGTTTAAAGTTTAAGGATGACCACTGGAGGCATAGCACCAGA
AGATTTAACTTCAACTTCCAAAGTAGGGGCCCTGGTGGGGGAGGGGAGGGGCATGCGTGCGGGTGTGGGA
TGTGTTGCAGAGGAGTTAAAGCTTGACGGGCTTAGAAGGTGGAAAGGGTCGAGATGCAGCAGAGAACAAG
TCAATGGAAAGCACAAAATAGGATGGTAGAAATAAAAGCACAGTAGATGTAAATAAACTTAAGAGTTAAA
ACTCTTAAGGCTCAAATTCTAGCTATAAATGATTGCCAAACTAAACACTTAAGAGTGTAAACAATTACTA
TAGGAAAAAGACTTTAAAGCAAAAAGCCCATTAGAGATAGAAGTTATTGGCCTAAAGAATGATTGTTCCT
CTGGGAAAACACGATGGTGATAACTGCACCAAGCAACATGGTCTCTGCAGTGTTTGGGTGTGACTTCATC
CCTGCCTCCCCAGGGACTGATGAGTCCTGGGCTCAGGCTCAGAGTGATGAAGCGGGTTATTGTCTTGGTG
CTGCCATATTCTCTTAGTCATGTGTTTTTTTTTTATTCATTGTCCTCTGGCCCTACACACAGTCCCTAGG
TTTGCTTTTATGCCAATTGCAGAGAATCTCCATGGCTCTACTGGCAATTGCTTGAGAGCTCACATTCCTA
CCGGATGTGAGAAGATGTTCCATCTTCCTGTGTCCGGGCAGCACCACCAAAGTGCGGGGCTGGGGCAAGC
CTGGATGGGGTAGGGTGTGGTCAAATGACTGCTCACAAGTGAATGGTTTGGATTATGCAACGTGGCCACA
CTGGAATCTCAATAAAGGGCAGAGGGGTTGAGGCCCAGATGATACCAGGTGAAAAGACAAGACAGGTTTG
CAGCATGTGCTGCGATGGAGATGCTGGGGCCTCCTAGTCTGGGGCAGGCTGAGCCTTCCTGGGTGTGGGT
GGGCCTCCACTGTGCAGGGTGCTGTCCTTCCAAGCTTTGGCAAGATGGAATCTGTGTTGGGTGTGGGTGT
GGCCTTGAAAAGGCACGCTGTCATCTAGAGGCCACTGCTTGACCCCCTGTTGCCCTTTATCAGAGGTGCG
GGTGGCTAGTGCCTGCAATGTCAACACTGGGAGGCCAAGGGGGGAATCCCTGGCTTGAGGCCAGGATTTC
AAGACCAGCCTAGGCAATATAAGGAGACCCTATCTCTATAGAAAAATTTTTAAAAATTAGCCATGTGTGG
TGGCATGCATCTGTAGTCCCGGCTACTCAAGAGGCTGAGGCAGAAGGATCACTGGAACCCAGGAGGTTGA
GGCTGCAGTGAGCCATGCTTGCACCACTGCACTCTAGCCTGGGCAACAGAGCAAGACCCACTCTTAAAAA
CAAATACCCTGGCCATAGCCCCTGGGAGTCTAGTCTCCATGCAACCAGGACCCCATGAGCCACACTTTAA
GGCTTTTACTTTGGGGGTGAGGGGTGGGTAGAAGGGAGGCCAAAGGTTGGGGCTGTTGAACCCATGAGGG
TAGACCTGTCCAAGAGTGAGGCCCTGACTGAGGAAAGGAGAGCTGATCTACAGAGAGGCTGAAGCCTCAT
CATATTCATTTTCTGAGTCCAGTGAATTCTGAAGTCCACATCCCAGATGTTTCACAGAAGTAAATCAATA
CATTCCTGATAGGATAAGGTTGATTTTCCTGCCACGTGCAGTCAGTTCCACCCCAACAGAATTCACTTGA
TCTGCACAGCCACCGTGGGGCAGAGATGATTGCCCCCATTTTACAGATATGGCCGGGAGGCTCAGGGAGG
CCATGTGCCTCACAGAGGACTGGTCTGCACAAAGACCAGTGGGTGACCAGAACTTGCACCTGTCTACATT
CGTCCCCTCACTGCATGTGCCCCTCTTGATGGGAGAGCAGGCACCTGCCAGCCCCATGCTGGTCCGCCCA
AGGAATGGCTCCTAAAACCACCAGCTGGCCAGTGAGTCATATGGAAGGGTTTGGTCATGCCTACACTCGT
CCTGCCCTTCCTCCCTGGTCATTACACTGTGGTAGTGGGGGAGGGTGACCTCTGCTTTGCCCCTTGTCAC
CTGGGGCAAAGGGTGGGATCCTGTCCATATAGGACCAGGGGCTCTCTTACTGTCTGCACTTCACTAGTGG
GGGCCACTTTCAGTTTGCTTCTACCTGGGACGCTCTGGGTACTATGCTAGAAAGGTAGCTTATGGCCACA
AAGTCTAGGGACAGGTACTCACATGCCCAAATGGAGCCTCACGCTTAGGAATGGGGTGAGTGGGAAGCAG
TAGCTTCCCTTGGAGGTGGAAAACGGGGAGATTTCAGTTTCCAGAAAGCCCTGGGGCAGCAGCTGCCTGG
GTGAGGTCTTCCCTGAGCCTCTGAGTCTTCCCTCTCCTCTACTTCAGGGGGGTCTAGCCTCTCCTCCAGA
AGGGGTGCCAGGACGAGATGGGAAGGAATTTGCTTTGGAAGGCTGGGAACAGGTCCTGCAGCTGCTCTGG
CCTTCCTCTGGACTGATGTGGGTCCCAATGTTACTGAAGGGCACTTCCAGGTCCTGTTAGTGCAGGGGCC
GCTGCAGCAAAGGGCTGACTTTAGGCTCCCTCTTTGTTTTGTTTTGTTTTTGAGATGGAGTCTTGCTGCG
ACCCCCAGGCTGGAGTGCAGTGACGTGATCTCGGCTCACTGCAACCTCTGCCTCCCAGGTTCAAGTGATT
TTCATGCCTCAGCCTCCTGAGCAGCTGGAATTACAGGCTCCTGCCATCATGCCCGGCTAATTTTTTTTTT
TTTTTTTGAGATGGAGTTTCTCCCTTGTTGCCCAGGTTGGAGTGCAATGGCGCAATCTCAGCTCACCACA
ATCTCTGCCTCCCGGGTTCAAGTGATTCTCCTGCCTCAGCCTCCTGAGTAGCTGGGATTACGGGCACATG
CCACCATGCCCTGTTAATTTTGTATTTTTAGTAGAGACGGGGTTTCTGCATGTTGGTCAGGCTGGTCTCG
AACTCCTGACCTCAGGTGATCCGCCTGCCTTGGCCTCCCAAAGTGCTGGGATTACAACCATTAGCCACTG
TGCCTGGCCAATTTTTGTATTTTTTAGTAGAGACTGGGTTTCACCATGTTGGTTGGGCTGGTCTCGAACT
CCTGACCTCAAGTGATCTGCCCATATTGGCCTCCCCGTGTTGGGATTACAGGTGTGAGCCACTGCACCCG
GCCTTTCACCTCCCTTTTGAAAAACTGACTGCTCTTGGAGCCAGTTCTCACTGCTTATGAAACGGTTGGG
GACATCACATCACTGCTCTCAGCCTCAGTTTCCACATCGTGAACTAGGATTTGTAATCCAGGCCCAACAG
GCTTGTGAGAATTTAGATGAGTGAAGTGCTTTCATAAGCAACTTTTTCACGTGCCATTCAGTTTGCCCAT
CTAAAGGGTATGGCTCTTGGCCAGGCGTGGTGGCTCACGCCTGTAATCCCAACACTTTGGGAGGCCAAGG
TGGGCGGATCATTTGAGGTCAGGAGTTTGAGACCAGCCTGGCCAACATGGTGAAACCCCATCTCTACTAA
GAATACAAAAATTAGCCGGACGTGGTGATGGGTGCCTGTAATCCCAGCTACTTGGGAGACTGAGGCAGGA
GAATTGCTTGAGCCCGGGAGGTGGCGGTTGTAGTGAGTAGAGGTTGCGCCATTGCACTCCAGCCTGGGTG
ACAGAGTGAGACTGACTCAAAAAAAATAAAGGGTGTGGTTCAGTGGTCTAGTATATCCACAGGTATGGGC
AGTCATCTCCACAGTTGAACATCTTGCCCACCCCAAAAAGAAAGCTCGTGTCCCTTAGTCACTCCCTGTC
TCCCGTCTGCCGCCTCAGCCCTGGGTAGCCACTGAGCCACTTTCTCTGGTTTGATCTGGCACTTCTAAAG
TAGAAGTTATTATTGGCAAAGGCACTGGCTCATATTTCTAAGAGATCATTTAGAATGCCAGGGGCAGCAG
AGGATGGGTCTTCCTTGCAGAGAGAAGTTTGATTTACATTTCAGAAGGATCTTTCCTGGCATTTTAGGCC
ACTTGGCATTAAAAAGAGACTTGTGGGGCATTGTCTGGAAGGGGACTTTTGCCACTGTGAGCTGGTGACA
AGCTGACTAGAAGTGGGGGTGTCAAAGGCTGGAATCACCACATTGCTGGGGGCGGATGAGGGGACAGTTA
GTGGATTTGGGGTCTGTTCTTTCTCATCTCTCTTGGTGACCCTTCCCCTCCATCAGGAAATGAGGTGCTG
AGCCATCTCTATGGTCCCAGCCTTCGGTTTTGCTCTGTTTGGGGCGTTTCAGAGAGCTGGACTGTCCCAG
GCCCCTTGGGAATTGGAAGCAAGTCCTAGAACTTTCTGGAACACAGAGAGTGGTCTGTTGGGCCTTCCTT
TGCTTCCTCAGTTCCCACCCTCCTCCTCCACTCCTTTCTAGGACTTTCCTTCCTCCACCCCTGGATCCTC
CAATGTTAACGGAGCAGGGGTCAGGAAATAGCCCGTGGGTGGGATCTGGTTCACCGCCTGGTTTTATACA
TACCAGGAGCTAGGAATATGTTTTAAAAATCAAAAGAATGGCTGGGCGTGGTGTCTCATGCCTGTAATCC
CAGCACTTTGGGAGGCTGAGGCGGGTGGATCAAGAGGTCAGGAGATCGAGACCATCCTGGCTAACACAGA
GAAAGCCCCTCTCTACTAAAAATACAGAAATTAGCTGGGCGTGGTGGCGGGCACCTGTAGTCCCAGCTAC
TTGGGAGGCTGAGGCAGGAAAGTGGCGTGAATCCGGGAGGCGGAGGTTGCAGTGAGCCGAGATTGCACCA
CTGCACTCCAGCCTGGGCGACAGAGCAAGACTCTGTCTCTAAAAAAGAAAAGAAAAAAAAATCAAAAGAA
CATTTCGTGTTGCATGAAGATTCTATGAAATTCAAATTTCAGGGCCCATAAATAGCTTCGTTGGGGCGCA
GCCACACTTGTTTGTTTACGTATGGTCTGTGGCTGCCTTCACCATGGATAAGAGACTGGAATAGCTGCTG
TGGTCTGTATTTTCTATCTTTACAGAAAATGCTTGATGAGCTCTGAGTAAGGCCTGACCATGTTCCTGAG
AGCTCCGTAGTGGACCTGATGGGAAAGTAGTGGATGGCATTGGTGGTGGCTGAGCCAGCAGGGTGCCTGC
TCAGAGAGCCGGTTATTAATGGAGTGCTAACCAGTCACTCTAGATGAGAAATACACAGATCACATTTAAA
CACAGGGAAAGCTGTTTACAGGAAAATGATAAAATAGCAGAACGTAAAGTTATGGGTATACTGTGCTTAC
GTTGTCATAAAAATGTGTACATATGGATAGAGAGGAAGGTGTCCCACGTGGAGAAATGAAAAGGTGCCTT
AGGGGGCAGGTTGGGAGTAAGAGCAGTTTTTCTTTCTATTCTATTTTTCTGTTTAAATTTTCCTATAATG
TTCTTATAATAAGTGTTGATGAGCACTCGCAGCCACCAGGGGAAGCAGCTACCCAGGCAGAAGGCTATTC
TGGGTCTCAGGTGGGCTTTAGGGAGAGGGACCCTGAGCTCTGGACCAGGGTTAGGAGGAGGTGCCCCGGG
CATGTGGAGGCTGGCAGCCCTCGCTCCTGTGAACTGGCGGCTGGGGCTGCATCTCGCCCACGTCGCTGTC
ATGTGCGGGGCCCACGTTGTGAGTTGTGTGTCTGCTCACTATTGTGCTGTAGCCTCTGGAAGTTGCTTAG
GAGCTTGGGATTTCGTGGAGAGGTGGGAGTTAGTTGCTTCTGTCCAAAGAGGTCGGCCAATGGGGGCCAT
TCTGAGTTCAGAAACCGCTGGCTTGGAGCCCGATGGACCCAGCCAGGCCCAGCTCTGCTGTTGACCAGTT
ATGTGCTCTGGGACTCAGGTTAAGTCTGTGGGTGGCAAAACTGGCACCTCCCATCCCATCTTCCCTCCAT
CCCCTCCCCCCACCCCCATGTCTCACTCTGAGCCTTAGGGAGTTGGTGCCACCTAGCTACGCTCACTGAC
ACGCATCTCATGCTGTGCTAGGATGTTGTCCCCATGTTAGTGTGCCCTCTCCAGGGAGACTGCCAGCCCT
CGTGGGTGTGCATCTTCTGCTTCTGCATCCTTGGTCACTGCCAGCAGAGGTCTGGGCACATGGTGGTGGA
CAGTGGCTATTAACTGTGGTTGTGCTGGAATGGAGGAGGCCTGGTGTCTGGTCTTGGAGTCAAGAATGCA
TGTGCTTAAGGATTCCAAGATCACACGGAGGAGGGTATGATTAGCTCTGGGAAGCGGGGAGGCAGGAAGG
AGGGCAAGAGACCTCGACCTGTTCTTGGGAAGGAAAGAGCAGGTGAGGGTGGGGTACTGTTCCAAGCACG
GGAAACAGAGCCCCAGGAGGTGGCCATGGCCTGGGGCTGGGGCTGGGGCTGGGAGGCGGTTGCTCCAGCA
TGCAGTCACTGAGCCCTCCTGTATGCACTGCTGCAGGTGCTGGGAGACCGTGAAGTGCAAAGCAGATGGA
GTCCAGGCCCTCGGGGAGACAGCACGCCAGTGAGGGAGATGGAGACCAATCACCCACCCAGTGTGCGGTA
AGTCAGACGGTGACAAGCTCTGAAGACAAGGAAAGCAGGGAGGAAGGGGCGGGCTATGCCCCTTGCTCTT
TCATGTGGGGAGCCAGAGGGAGCCAGAGGATGTGGGGATCGACCACGTGGTTAGGGGAGGAAAGCATGTT
TCAGGCGGAGGGTGGGCAAGCGCAAAGGCCCTGTGGCAGGCGCGTCTGTGAGTGGTCAGAGCAGAGTGAG
GGGTGGGAGATGGGGCTGGGTCAGTGGAGTGGGTGTGTACATGCAGGTCTGCAGACCCAGGTAAAGAGTC
TGGATTTCATTTCTAAGGGGATGAGAAGCTCGGGAAGGTCTGACCAGCCTTACGTCTTGAAAGGGAATCC
CCTGCTTCTGCGTGTCAGGTGTTACTCGGGGTGCGCCAGTGGAAGCGGGAGGCAGTTGCAGCTTTCAGGT
GAGAAATGATGGCAACTCGCACGGTGGGGGAAGAGGGGCCACTGTGGAGGTGGCTTGCGGGGCCTGTCAT
CTGCTGTTTCCTAGCTCAGTGTACAGGGCCCCCACGCACCCCTGCCAGGTCGGAAATCCAGGTACTGCCA
GCCTCTGCCGTTCTACGTGTGGCCAGGCGGGGGAGCTTCGCCCTCCCATGTCCCTCACCCCATGCCCCAG
ACAGCACGGTCCTGCGATCCCCCTCCCATTCCAGTGCTCAGTATAGCCGTATCCCTGCAGGCTCAGGCCC
CCACCATGGCCAGATCCCCCACCCCACCTTCACCCTCCGCCAGTCCATTGCACACATAGCATCTGGAATG
GTCTCGGGCAGCACCTCAGACGATGTGGCTGTGTTGCATGAGCCCCTCCCCTCACCGCAGCTCTCGGCCC
TGCCTGAGCCCAGGTGCCCGCGGGCTCCCCGCTCACCTCTGCCTTGAACCTTCCTGAGTCTGAGCTTCTT
TTTTGTTTTGTTTTGTTTGGTTTTGAGACAGAGTCTTGCTCTGTCACCCAGGCTGCAGTGCAGTGGCGCG
ATCTCGACTCACTACAAGCTCTGCCTCCTGGGTTCATGCCGTTCTCCGGCCTCAGCCTCCCGTGTAGCTG
GGACTACAGGCGCCCACCACCTCGCCTGGCTAATTTTTTGTATTTTTAGTAGAGACAGAGTTTCACCGTG
TTAGCCAGGATGGTCTTGATCTCCTGACCTCGTGATCTGCCTGCCTTGGCCTCCCAAAGGGCCGGGATTA
CAGGCGTGAGCCACCATGCCTGGCCTGAGCCTGAGCTTCTTAAACACCACATCCTCTAGCCTCCTGCCTT
CACACAGGCTGTTCCCTTAGCCTGGACTTTGTCCCCACCCACCCGCTCCTGATCTTTCAGGTCTCAACTT
ACAGGTCACTTTCCCTGGGAACCTCCTCAGACCCAGTGAGGCCAGATTAGGGGCCTCCTCAGAGCCCTCA
TGGCCCCAAGTGTTTACCACTTCGCTTTTTCATACTATCCAAAGTGCACAGAATCGTACACTTTTCTGAT
GCCTTGTTCCAGCTGAGTGCCCTGAGGGCAGGGATGGGGTCCGTGTCCTCCGGTGTGCTCAGCCAGCACC
TGGCCAGGCACTCTCAGTGTTGTTGAATGAATGAGCGAGTGAGTGACCCGCAGGGGAAGCTGCTGTGTCT
GACACGGTAACGTGCAGGTTGCACTGGGGGGGCCTGGTTGAGATCATGACTGGAGTCCCTGGCCCCCAGA
GTGGGAGTCATCAGTGGGGCTCGCTACCTCTGCACAATTTTTTTTTTTCTTTGAGACGGAGTCTTGCTCT
GTCGCCAGGTGGTACAGTGGTACGATCTTGGCTCACTGCAACCTCCGCCTCCTGGGTTCAAGCAATTCTC
CTGCCTCAGCCTCTCGAGTAGCTGGGACTACAGGTGTGCACCACCGTGTCCAGCTAATTTTTGTATTTGT
AGTAGAGACGGGGTTTCACCATGTTGGCCAGGATGGTCTCGATCCCTTGATCTTGTGATCCGCCCGCCTT
GGCCTCCCAAAGTGCTGGGATTACAGGCGTGAGCCACCACACCCGGCCCCTCTGCCCACTTTCTTCCCCT
TCCTCCTCTCCCGTCTCCACCAAGGCTGTCTCTGGAGTGGCTGTGGATCTGACAGAATGCATGTCCGCTC
TGCCATCACTATTCACGCACAGCGCCTGTTGGGGACTCTCCTGTAACCCAAGGGGGTAGCGGAAGGATGG
AGCTTCAGGCCTTGAGGGCCAGGAAATGAATGTGGAAGACTGAATCCTCAGGGGACCCCAACTCTGGGCC
GGGTCTGGGGCTCTGTTTTGAGGACGGGGAGTGGGAGGAGGTGGCAGCAGGAGCCGGCGTCTGAGGCATC
TCCTCACACTCTTCCAAGGTCAGAGACGAGGTCTCAGATACGCTTGCTAATGCACGATTTATTTCTTTTT
CAATTTCCTTTGGAACCTGTGCTGTGCAGATGTTCACATGATGTGGTGGGGAAGTGAGTTTTATAAAACT
CTTGGCAGAGTACCATTCGGCATCCCTGTGGTTCTAGAGATTTCTGGGGCCTCGGGGCTGTAGCACCAGC
TGCAGACAGCTGCCTGCCTTCTTACAGTGCTCAGCTTTTGGGTCCAGCAGCTTTCTCAGTCCCAAACACA
TGTGACCTCACGATTCTGGCCCTTCCATGATCCGCAACAAACTGTTCTGGTGTGTAGGTGGAATTCCTAT
TTTTAATAGCCAAGTTGTTGAGAAATTGTAGGGCTTCTACTTCCTTTTGAACGGAAGGGCTCCGGAGATA
TTTATATCTTTGCTTCTATAGAATCTAGGAGGTTGTCTTTACCCAGGGAGGGTCAGCATGTGGAGAGGGT
CACCTGGGAGAGGCCCCGGTGTCAGCCTGCACTTGCCGTCAGTAAATGGTACGACATTGAGCACCAAGGA
GCTCAGCCAGCCCCTCGAGGGAAGTCCTAGCTGCCCACTGGGGGAAGGGCGGGGAGGCATGAAAACAATG
ACCCCACTGGCTGGTGGGGGTGACCGTGTTATGCAAAGTGTACACCATGTAGCATGAGCACCGGGCCGGG
AGCCCCCAAGGCTGCTGGGGAATCAGGGAGACACCAAAGAGGAGGTGGCCTTTCCCTTGAAGGGTAAGGG
ATCTGTAGGAGTCTGTGGGAGAGTGGAAGCTGCGGGAGGGAAAGGAGGGAGGGAAGGAGGCCTGGAGAGA
GGAGGGAGGCTCTTGCATTCCAGGCAGGTATGGGAGCTCCTGGCAGAGTTTGCAGTACCCAGTGGCTCAG
TGTGGTTGGAGTTGGCTGTGGGCCAGGTGGGTGGGTAGACAGGGGCCAGGTCTGGAGGGGTTTTTAGTGC
TGTGCTGAGGGGTCTGAAGTCCATCCCGAAAGTTGTAACTGGGGAGTGGCACGGTGGTGAGTTAGAGCCA
CGTCATTCAAACTTTCTCAAATTCCCATACATAGAGACCTAGTGTGCACACTCGCAGCCCAGGCTTGTGA
GCTGCAGTCGCCCTTGCCATGTGCAGCTCGTTCTGGCGTGTTCTGTTCTGCTTCTATTCTGGCTCATTTG
TTCTATGAACAATGCTGTTTGCAATCCTCTACATTGGCTTCCTCTCTCCCTGAATATTTTTGATCTGCAG
TTAGAACAACACTGGATTGGCAAGAGGGAGACTGAGGCGGGAACCCAGGCAGAGGCTGCTGTGAGTCCAG
CTAGGATGAGACGTGGGTGCCAGACAGTGGGCCTGGGGCAGACCCCAGGGACTCCGCAGTGAAGACCCCA
CCTCAGTGGTCCTGGGCCCCAGGCCTCAAGAGACTTGGGGCAGCTCCCTAAGCAGCAAGAGGGGTCCTGT
CATCGTGAGGCGTGTTGAGGATCGAGAAGCTGTGGTTTCATAACTCCGTCACTGTGTGGTGTCTGAAAGC
CATTTCATTAAATGTCACATGGAATCAAAATAGAAATTACATCTCTGGGACAAAGCCCATTGAGCCAGGA
GCCAGGGATTCTGAATTGGAACCAGAATAGCCTCCGAAGCTGGGACTGTGGATCCAAGGCTGCCCCCACC
CCCTGGGTCTCGCTCACATCTGCACTCCCCAGAGGGGGCAGGTGGTCCTGGAGCCTAGCCTACCTGCCGA
GAGTCAGAGGTGGCTGCAGGGGAACCATGGCAGCCCTCCTTCTCACACTCATCCTGGGCACCCTGCACCA
GCAGAAGGGTTTACATGTACAATCACCCATCCCTAGCCCCTTCTGGGAGGGAAGCATATCTTACGGATGG
CGACCTTGAGGCTCAGGGAGGTTAAGGTGCCAGCCTGAGATCACACAGCCAGTGAGAGGCAGAGACAGGG
CTTAAACTCCAAACGATGGCTCCAGAGCCCCCTCTCTTTTCCATGCCCTGGGCTGCCTCTTTCCCCAGTG
CACCTTGCTTTTTGGAACCAGATGACCAATGTGGAAAGACACGAACTGATTCAATCAGAGTGTATGGAGA
AGGGACTTAGAGACCCTGGTATTTTTAAAGCTCCCTGGTAATTCTCATGTGCAGCTAGGGTGGGGCGCCT
CTGCTCTGCGGAATAGGGAAGGGGTGTAAGTGGCCCTGTGTCTCCCCTCTGTCCCCACCTGCCACCTGCT
GGTCCATCCATTCAGCCGTTGCACGGACAGGTTGCCTTCTGGGGGCTGCTAGCCCCCTTGCACTGGGCAA
CGCTGTGTCCCCTCTGTCCCTCCCCCCAGCGCATGCTCCTCGCTCTGCCCCTGCTGCAGGTGGGCCATGC
TTGGAGGGCGCAGGAGAGCTGAGATGGGGTGGGGATGGATCAGGCCTTGAGAGGGTGCCTGGTAAGCCCC
GGGAAGGGTAGGGAGGAGGAGGAGGGAGAGGAGAGGGCAGTGCAAGGGCAGCGACCCCCAGCCTTGCCCC
CGTTTTGAGCACGGGGAAAGTGTACACAGGTAGTGAGGAAATGCCTGCGTTTGGGTGCGTGTTCATTTCT
AATCCATTTTCACTTTTTGTGTATTCTTTCTATCTACTTTTTAAAGGTTTGTTTCTTTTCTAACTTCCTG
TTTTAGATGTATACTTTAGTTTCTTTATTTATTTTTATTTATTTTTTTGAGATGGAGTCTCTGTTGACAG
GCTGGAGCGCAGTGGCGTGATCTTGGCTCACTGCAACCTCTGCCTCCCGGGTTCAAGCGATTCTCCTGCC
TCAGCCTCCTGAGTAACTGGGATTACAGGCGCGCACTACCACGCCCAGCTAATTTTTGCATTTTTAGTAG
ACATGGGGTTTCACCTTGTTGGCCAGGATGGACTTGATCTCTCGACCGCGTGATCTGCCCACCTCGGCCT
CCCAAAGTGCTGGGATTACACGTGTGAGCCACTGGGCCCGGCTTAGTTTCTTTATTTAAAGATAAGGGTT
TTTTTTTGTTTTGTTTTGTTTTTGAGACAGAATCTCACTCTGTTGCCCAGGCAGGAGTGCAGTGGCACAG
TTGTAGCTCACTGCAACCTCAACCTCCTGGGCTCAAGTGATCCTCCCACCTCATCTGAGTATCAGGGACT
ACAGGCATGCACTACCACACCCAGCTAATTTTTGTATTTTTTTTGTAGAGACAGGGTTTCGCCCTGTTGC
CCAGGCAACAAGCAAATCTGCCCACCTCAGCCTTCCAAAATGCTGGGATTACAGGCGTGAGCCACCACGC
CCGGCTAGAGATAAGTTTCTCAAACTCCTGGGCTTAAGCCATCCACCCACCTTGGCCTTCCAAAATGTTG
AGACTACAGGTGTGAGCCTTTGCATTCGCCTTGAATTCCTTTTTCAATAGTATGTTTCCTACTAAAAACA
CTTATGAAAAGTGTGTATTTTCTCTTACCCCTTCTCCTTTTTTGCCATCTAATTTTAGATTATATTTCTT
AGTGTTTGTCTTTAAAATGTACTTATACCTCTATGCTATCTTTTTCTTATTTTTGCCCCCTCCCCCATAA
GAAAGATAAAGAAATCAGAGACTTAGACCAGGTGTGGTGGTTCCCGCCTGTAATCCCAGCACTTTGGGAG
GCTGAGGCGGGTGGATCACTCGAGGTCAGGAGTTTGAGACCAGCCTGGCCAACATGGTGAAACCCTGTCT
CTAGTAAAAATACAAAGTTAGCCAGGCGTAGTGGCAGGCGCCTGTAATCCCAGCTACTCCAGAGGCTGAG
GCAGGAGAATTGCTTGAACCTGGGAAGTGGAGGTTGCCATGAGCCAGGATCATGCCACTGCACTCCAGCC
TGGGCAACAGAGTGAGACCCTGACTCAAAAAAAAAAAAAAAAAAAAAAAAAAAAAAGAAATCAGATACTA
ACAACTCTCTCCTTCTTTCTTTTCTTCCCAATTTTTGTTTAATGTATCATTTCTAAATTCATGGTTTATA
TTTATATATGTCCTTAATCCTCACTCACATTGCCCTACAGGTAGATTCATTGCTCACTGTCAGTTCTCTT
GCTGAAGTTTTCCTATTTTTCTCTTGATTTGCTGAAATTCCTTCTCCAGTAGTTTAATCAAAAGGGACTA
AATGAAAAAAAAATATTCAGTTATTGCAAGTTCAAAAAGGTTTCTAGTCTTTGTGTTTGATTGACAGCTT
TCCAGAATATAAAATTCTTAGGCCACACTTTCTTTCCTTGAGAACTTCACAGATGTCACTTCTGTCTCTA
GAGTTAAATGCCACTGTGGGAAAGTCTGAGTCTAACTTCTATTTTGTTACCCTTTATGAATTGATGTTTT
CACTTGACTGTCCAAAGTCTTTTTTATTTAGCTGTTTCCCCCTTTCTTTTATATTTTTAGTCTAGTTACT
TTCATAGAAATTACCTTGTTATTGACAGATTTTTGTCATTTTCCCCAAGACATGGTGTGCCCTTTCAGTT
TGTAGATTTATCTTCTTTTACTTCAAGAAAATTTTCTTGAATGATATCTTTAAATATTTATGTTCCCCTA
TTTGAGTTTTCTATTCTGGGATATATGATGGGTCCTTTGTAGATCTTCCAAATCTGTAATTTTCTCTGTA
ATCTCTTTACACCGTTCATTTTCATTTCCTTTTGCTCACTTTCCTCAGTCTTGTTCTCAGTGTCTTGATT
GTGTCTTGAGCAATATTTGATGCTCCTCTGCGCACCTTTCCATTTCATCATGACTTTGAAGATACGATGT
TTTTCCTTCTTTCTCCAGCTCTGTCAGCTCCAGTTTCATGTTCCCCCTGAGCTCTCATATCTGTTTTGTG
TGCTTGCTTTCTGGAGAGGATTGCTGTATTCATTTTTTTTTTTTTTTTCGAGATGGAGTCTTACTCTGTT
GCTCAGGCTGGAGTGCAGTGGTGGGATCTCAGCTTGCTGCAACCTCTGCCTCCTGGGATCAAGCGATTCT
CCTACCTCAGCCTCCCAGGTAGCTGGGATTACAGGCTTGCGCCACCATGCCCGGCTAATTTTGGTATTTT
TAGTAGAGATGGTGTTTTGCCGTGTTGGCTAGGCTGGTCTCGAACTCCTGGCCTCAGGTGATCTGCCCGC
CTCAGCCTCCCAAAGTGCTGGGATTGCAGGTGTGAGTCACTGCGCCCAGCCCTGCTTTATTAATTTTTGT
TGTTGTTTAATTTTCAGCGAAAAGTTTGCTGGCAATTTTCATCTGTTCTATGACAACATTTTTACTAGTG
AGTTTTCACTTGCCACTTGTTTTTCCTGTTCCTTTTCTCGTTTTTATTTTTTAATTCTTGCAGTGTCTTC
CTGTAGATGCTGCGCTGTTTGCTTTTTTATTTCTCATCTTTGGGCAAGGTAAGTTTTTCTTCAACCATCT
ATTTGCCAGAGGTTTGTGTGGGAGAAGAAGCGAGGACTACACCCAGTGCCATGTGCAGTTGTAGGGCTGC
TCATGTGCAGTCTGGTGATTCCTCTTTTTGCCTGCAAGTGTGGCTTGTCTGTGTGATTGTCTGTGTCTGA
TCTGCTGCTTCTGCTTCTTGGTTCCAAGCTTACCTGTATCTCACATGCCACTGTCATGAGATCACAGGCC
CCACTCCTGCTCATGCAGATAAGGGACGTTGGTTGGTGGGCAGTGTGATCCCTTCTCACTGCTTCTTCCC
AAACATCTGTGTGGTATTTCCTGCCTGGGCAACCCTCTGACTCGTTTCTAGTTTGGGTTTCATCTCTCAT
CTGTTTCCATTGGAAATGGAGTGTAGCTGGGCGCAGTGGCTCATGCCTGTAATCCCAGCACTTTTGGAGG
ACGAGGCGGGTGGATTGCTTGAGCCCAGGAGTTCGAGAGCAGTCTGGCCAAGAAGGTGAAACCCCATCTC
TACTAAAAACACAAAATTAGCCGGGCGTGGTGGTGCAAGCCTGTAATCCCAGCACTTTGGGAGGTCGAGG
CGGGTGGATCACGAGGTCAGGAGATCGAGACCATCCTGGCTAACACGGTGAAACCCCATCTCTACTAAAA
ATACAAAAAATTAGTCAGGCACGGTGGCAGGTGCTTATAATCCCAGCTACTGGGGAGGCTGAGGCAGGAG
AATCGCTTGAATCTGGGAGGTGGAAGTTGCAGTGAGCCGAGATCACGCCACTGCACTCCAACCTGGCGAC
AGAGCGAGACTCTGCCTCAAAAAAAAAAAAAAAAAGATGGCGTTTGCATCCTGTTTCTCTTTCTCCTTGT
TACTATGGGATGATTTTTTTTTTTCGACTTTATTGGTGTATAATTGACATACAATAAACTGCGCCTATTG
AATGTGTTATTAGTAAGTTCTGACATATGTATACACCCATGCAGCTGTCACAACCATCAGCCACTAGACA
TCCTGTCACCCTCCACAGCTTCCTCATGCTGTTTCTTACCTCCACTCCCATTTTCAGACAAACTGACTGC
TTTCCGTCGCCAGAGTTTACATTTTCTAGAATTTCATGTAAATAGAATCCTACAGTGTGTTGTGTTTTTT
TTTTTTTTTTTTTGATGTGGTTTCTCTCACTTAGCATAGTTTTTTTTTCTTTTGAGAAAGAGTTTTGCTC
TTGTTGCCTAGGCTAGAGTGCAATGGCGCGATCTCGGCTCACTGCAACCTCCACCTCCTGGGTTCAAGCG
ATTCTCCTGCCTCAGCCTCCCAAGTAGCTGGGATTACAGGTGCCTGCTACCACGCCCGACTAATTTTTTG
TATTTTTAGTAGAGATGGGGTTTCACCATGTTGGCCAGGCTGGTCTCAAACCCCTGACCTCAGGTGATCC
ACCCGCCTTGGCCTACCATTGCTGGAATTACAGGCATGCGCCACCACGCCTGGCCTAGCATAGTTATTTT
GAAGTCCATCAGTTGTATATAACAATGGTTCATTCCTTCTTATTGCTGTGTTGCATTTCATTGTATGGCT
ATGCCATATTTATTCATCCATTCACCTGGTGATGGACATTGGGGCTGTTTCCAGCTTTTGGCTATGATGA
ATCAAGTTGCTGCCAGTCTGCATGTAGATTTTTTTTTTTTTTTTTTTGTAGACAGAGTCTTGCTCTGTTG
CCCAGACTGGAGTGCAGTGGTGCGATCTTGGCTCACTACAGCCTCTGCCTCCTTGGTTCAAGCGATTCTC
CTGCTTCAGCCTCCCAAGTAGCTGGGACTACAGGTGCCCACCAACAGCCCAGCTAATTTTTTTTGTATTT
GTAGTAGAGATGGGGTTTCACTATGTTGGCCAGGCTGGTCTTGAACTCCTGACCTCGTGATCTGCTTGCC
TTGGCCTCCGAAAGTGCTGGGATCACAGGCGTGAGCCACCACACCTGGCCACATTGCTGTTGAGGAGGTG
CATAGGAGCAGAATGACTGGGTCATATAGTAGGTTTCACTTTTTAAGAAGTGACCCAACTGCTCTTCAAA
GTGACCATACCGCTTTACATGCCTCTGAGCACATAAGAGCAACACAAGAGTCCCAGTTGCTTCATACCCT
TGCCAACACTTGGCATGGCCAATCTTTTACATTTTAGCCCTCCGAGTGGGTGTCTAGTGTATATCCTTGT
GGTTTTCATGTACATTTCACCAATAACAACTGGCATGAGCCTTTTTAAATGTACTTATTTTTTATATGTA
CACCATCTTTGGTGAATTGTTCAAATCCTTTGCCCATTTATTTTTTATTTTTTATTTTATTTTTTTTTTG
AGGCAGTGTCTTGCTCTGTCACTCAGGTTGGAGTACTGTGGCCCCATCTCGGCTCACTGCAAGCTCCGCC
TCCCAGGTTCATGCTATTCTCCTGCCTCAGCCTCCCGAGTAGCTGGGACTACAGGCGCCCGCCACCACGC
CCAGCTAATTTTTTGTATTTTTAGTAGAGACAAGCTTTCACCATGTTAGCCAGGATGGTCTCGATCTCCT
GACCTCGTGATCCGCCTGCCTCGGCCTCCTAAAGTGCTGGGATTGCAGGTGTGAGCCACCATGCCCGGCC
CCTTTGCCCATTTAAAAATATCGAGTTGTGTTATATATTAGGTTTAACAGCTCTTTATTCTAGTTACACG
TCTTTTATCAGATATATGACTTGTAAATATTTTCTGTAGTCTGTGCCCTTCTTTTTCATTTTATTCAGTG
TCTTTTGAAAAAGTAAAAGACTTAATTTTGGTGAAGTCCAATTTACTGTTGCTTTTTTTTCTTTTATAGT
TTATGTTTTCTGTGTACTATTTTTTTTTTTTTTTAATTTTTTATTTTTTGAGTCTCGCTGTATCACCCAG
GCCAGAGTGCAGTGGTGTGATCTTGGCTCATTGCAGCTTTGGCCTCCTGGGCTCAAGCAGTTCTCCCACC
TCAGCCTCCCAAGTAGCTGGGATTACAGGCGCCCGCAAGCATGTGTGGTTAATTTTTGCATTTTTAGTAG
ATATGCAGTTTCACCATGTTGGCCAGGCTGGTCTCGAACTCTTCACCTCAGGTGATTTGCCTGCCTCGGC
CTCCCAAAGTGCTGGGATTATAGGCAAGAGCCACCACACCTGGCCCCTGTGTACTATTCTTAAGAAATCT
TTCCCTGTGGTGAAAAGGGAACTCTTGGACATGGTTGGTGGGGGTGTCGATTGGTACAGCCATTATGGAA
AGCAGTATGGAGGTTTCTAAATAAATAAAAAATAGAACTACCATATGACTGACCAAAGGAAATTATATCA
CCACCTTGTAAAGATAGCTGCACTCCTGTGTTAATTGCAGCATTATTCACATTAGCCACGATATGGAAAC
AACCTAGGTGTTGATGAATGAAGGGATCAAAGGGCCGGGTGTGGTGGCTCATGCCTGTAATCCCAGCACT
TTGGGAGGCCAAAGTAGGTGAATCACTTGAGGTCAGGAGTTTGAGACCAGCCTAGCCAACATTGTGAAAT
CCTGTCTCTACCAAAAATACAAAAATCAGCTGAGTGTGTGCTGGCGCGCACCTGTAGTCCCAGCTACTCG
GGAGGCTGAGGAAGGAGAATCACTTGAATCTAGGAGGCGGAGGTTGCAGTGAGCCAAGATCATGCCACTG
CACTCCAGCCTGGGTGACAGAGTGAGGCCCTGTCTCCAAAAAAAGATCTTTTTTGACTCTGCGATACAAA
GATGTTTTCTTCTAGGTACTTCATAGTTTTTACATTTAGGTCTCTGCTGCCTTGTTAGTTAATTTTTGTG
TATGGTATGAGGTTGGAGATTGGGGTTTATTTTTCTGTTCTCTTTGAGCCGGTTTCTGGGAGGAGAGAGA
GGACCCACCAGCTCCTCTGCTGTGTCAAGCTATTATACAAGGCCCCATATAGGCCGAGGTTTCTGTTTTT
TTCTTCTCTAGGAAAAAAAGAGGAAAAGCCATCAGCAATACCAAGGGAAACAGTAAGCTAAGATTGGCAT
AGTTCTCAGCAAGCCTCACAGCGATTCTCTGCTCCCTCCCTCACCCCTTGCCTACCTTTAATCCAAAAAT
GATTTTACCAGAATGTCCAACAAATAAGACAAGACCCAAAAGCACTGAGAACTTTTTCTTGCTGCCAAGT
ATAAAACACAGACCAGTATAGTGGCTTAAAAAAGCAAATTCCCAGGAAAATTTATAGAGATGGAAAATAG
GACAGTAGAATAGCAGGGACTGGGGAGGGGAGAAGGGAGAGGTGCTGTTGAACAGGTAGAGTTTCTGTTT
GGGCTGATGGAAAAGTTCTGGAAAAGAAATTGTTGATGGTTGCACAAGATTGTGAATATTCATAATACCA
TTGAATGGCACAGTTAAAAATGATTAAAATGGTACATTGGGTTACCTATGTTTTACCACAATTAAAGAGT
ATTTTTAAAAAAGCATATTCCCTCTGGGGTTAGTTAGCTGTAGTCAACACCTAAGTTCCCCAGTGATGAA
CTGAAGTATGGACCATCAGCATAAATGTGAATTAAAATTAAATATTGCCAGGCAGGCTGGGCGTGGTGGC
TCACGCCTGTAATCCCAGCACTTTGGGAGGCCTAGGCGGGCAGATCGCTTGAGGTCAGGGGTTCTAGACC
AGCCTGGCCAACATAGCGAGACCTCGCCTCTACTAAAATAAATACAAAAATTAGCTGGGTGTGGTGGCAC
ACACCTGTAGTCCCAGCTACTTGGGAGGCTGAGGCAGGAGAATTGCTTGAACCTGGTGGGTGGTTGGGTG
GGGGGTGGGCGCACAGAGGTTGCAGTGAGTCAAGATGGCATCATTGCACTCCAGCCTGGGTGACAGAGCG
AGACTCCATCTCAAAAAAAAAAAAAAAAAATTATCAGGCAGTATGAGGTTGCATGGTCAATATCCTAACA
GTCACAAAGCAAGCAAGTGATCTTGAGGGGGAAAGGGAGGAGGTGGGAAGAAAGGAGGAGGACCAAGTTC
CGCTGAGTGGCTAATAAATATTATTTTGGTTAAGTCCCTGTCTCCACAGAGTAAGTCCTGATTCTTTTTT
TTTTTTTTTTTTTTTGAGACTGTGTTTCACTCTTGTTGCCCAGGCTGGAGTGCAGTGGCGCGATCTCGGC
TCACTGCAACCTCTGCCTCCCGGGTTCAAGTGATTCTCCTGCCTCAGCCTTCCCAAGTAGCTGGGATTAC
AGGCATGCGCCACCATGCCTGGCTAATTTTGTATTTTTAGTAGAGACGTGGTTTCTCCATGTTGGCCAGG
CTGGTCTTGAACTCCCGACCTCAGGTGATCCGCCTGCCTCGGCCTCCCAAAGTGCTGGGATTACAGGCAT
GAGCCACTGTGCCCGGGCTGTAAGTTCCTGATTCTTAAGCCTAACATAGTTAAATTGCTCTGTAAAAAAA
AAAACAGTGGCTTTATATTCAAGACCATGTTGCTTCCAACTGAATTGGCCACTGACACTGGGATACTGAG
CAGTGAACAGACCACAAGGAAGACATCACTCTCGGATCCTGTTTGAAACCAACAGCTACAGCAAAACACT
AGTCTTGATTCAGGGCCTAATGGGGTTTCTTTAATTAGCAAGTTTACATTCATGGAGTCTTGTGAAAATG
GTTAGATAAATTGCAGAGAAATAAATAAGTATTTTGTACATCTGAGTATTATTGTTAATTTCCACCTGGC
TACATGAGGCTCCCTCCTCTGGGTTTTCTCTCTATGCCCTTTTGCTGTGGACAGAAGGTACCTTGCTCAT
TCATCCATCCAGCCGGTGAGCCAGGGGGCAGCCCGGAGGGAGGAGTGGAGGGGATGTGGGCCTGGAATTA
GACTGAGCTTGGTGTGTCCCCAGCTCAGGCCGCACTGCCAGGCCCTGGTTTCGTTACTATGAAATGAGGG
GTGGGGTGGGTATCTGGTCTCCCACTCCCCATTACTGAGGGGTTCCCGGGCTCTCCTCCACCCTCTGATT
CCTCCCCCTCTTCTGTTCCAGTCCAGAATGCCTCCTTTCTGCCTAAACGCCTCTGATCTTCATTTGATCA
TCAGCAGCTGCAGACCCATGAGCCACTGGGCCTGACCTGGGAGACACTGGCCCTCCACTTCCAGTGCTCT
CCAGCTGGATTTCCTCCAGAACAGTGGCAAAGAGTTCGCCCAGAGCTGCGTCCCCTCCCTGGGAAGCAGC
GCTGAGTCAGGGTTACCTGGCTCCACTGTGCCCCTAGCGAGGTGAAAGTTCGCACAATGACATGGGCTCT
CTGTTGAGGATAAGGAGGCTACAGCCCAAGGAGCTTGTGCACCGCAGGCAGAGCCACTCAGGTCATCTTC
CAGAGCGGGATGTCTGACTCCAGAGCCCGCCAGCCCACACTGCTCTCCTGAGGACTGGGTTTCTCTGGCC
TGAGTCTGCCTGAGTCTACAGGAAGAACCCTGCTGGCACCCCAGTAAGCCCCTCTAGACCTTGGAGCTCT
AACTGCTCTCAGAGCTCACTTTTCAGTTAGCCTGTAAGGCAGGGGTGTCCAATCTTTTGGCTTCCCTTGG
CCACATTGGAAGGAGAATTGGCTTGTGTCACACATAAAATACACTAACACTAACGATAGCTGATGAGCTA
AAAACAATTAAAAATCACAAACTCATAATGTTTTAAGAAAGTTTATAAATTTGTGTTGGGCCACATTCAA
AGCCGTTCTGGGCTACGGGTTGGACAAGCTTGCTATAATGGATCAGAGATATGTACAGTCTTAAAGAAGA
AACAGCTCCCAGGCCTGTAAGACCTATCAGGGCACTCACTGAATGCTGTGAGCAGGGGAAGGGGCAGTCC
TGGGCAGTGGGGTCCTCTCTGGGGGTCCAGCTGTGTCTCCAGTCGTCTGGGGAGCTGGGAACAGCACACC
AGGGTTCTTGCCTCCTGGGAAAGTTCTCACAGAAAGAGAGAACAGAGGTGCAAAAGCTAGGCCATGTTCA
TTATTCTTTCATTCCCTACTTATTGAGCTTTGACAATGTGTGAGGGACTGCTTGATTGATTGACTGATTG
ATTGGGACAGGGTCTCTGTCACCTAGGCTGGAGTGCAGTGGTGCAACCTCAGCTCCCTGTAACTTCCGCC
TCCTGGGCTCAAGCCATCCTCCTACCTCAGCCTCCTGAGTAGCTGGGATTACAGGCCCACGCCACCACAC
CCGGCTACTTTTTGTATTTTTTGGTAGAGACAGGGTTTCGCTATGCTGCCAGGCTGGTCTTGAACAACCA
GGCTCGAGTGATCCTTCTGCCTCCCCTTGGGCTCCCAAAGTGATGGGATTATAGGCTTCAGCCACAGTGC
CCAGCCAGAGGAACGTTTCAGATGCTGGAATCAATGGTAGTGTGTTGGAGGAAGGGAGTTTCTGAGCTCA
GCCCATTTCTTTTTTTTTTTTTTTTTTTTTTTGAGATGGAGTCTCGCTCTGTCGCCCAGGCCGGACTGCG
GACTGCAGTGGCGCAATCTCGGCTCACTGCAAGCTCCGCTTCCCAGGTTCACGCCATTCTCCTGCCTCGG
CCTCCCGAGTAGCTGGGACTACAGGCGCCCGCCACCGCGCCCGGCTAATTTTTTGTATTTTTAGTAGAGA
CGGGGTTTCACCATGTTGGCCAGACTGGTCTTGAACTCCTGACCTCAGGTGATCTGCCTGCCTCTGCTTC
TCAAAGTGCTGGGATTACAGGAGTCAGCCACTGCAACTGGCCCTAATAGACATTTTTTTAAACTAAATTA
TTACACTACAGAAAAATGCACACATCATAAGAGCACAGCTCGATGCCTTTTCTCAAAGTGTATGCACTTG
TGAAGTCAGCCTCCAGATGGAGAAAGAGAACATCATTAGCACCCAGGAAACCCCTCTTGGCTCCTCCCAG
TCCTGACCACACTAAGGCGCCTCCATCTCCACTTCCATCCCCAGAGATGGCCGCTGCTCGGTGTGGTACT
TTATGCAGACAGGATCAAGGATGGTACACTTTTTGGTGCCCTTTTTTGGCTTGACTCAACATTATGCTTG
TGAGACTGTGTTGCAGGTAGCTGTAATCTTTTTTGTTGCTGTAGAGAGTATTCCATTGTTTGACTATACT
ACAGTTTGTTCATTCTACCCCTGATTGGCATTTGTGCATTTCATTTTTAAAATTATGAATAACTCTATTA
GAGGCAACTAATGGCTCAGTTTTGCTCCTTGCTCTGCAAACCAACCCTGCCCATAGGAACTGAACTTGTA
AAGGGGCAGGTGACGTATTTTAGTGAGAACCTTCCATGGCGTAACCTAGTAGAATGCCTAATGTTGGAAC
CTCGGGCATCACAGCTGGCCTATTTATTTTAAATAAATGAGTTCATGAATAAATGAAGGAATAAAGGAAT
GAATGAGAGGAGGGGTAAGTGACTAAATGAATGCATTTCTGGGAAGAGCATTATTGGGTACTCACCTGTG
TCAAACACCTCTGGTCATCTTCATAAATGCTGCCATATGTAATCCTTGCCACAACCCTTTGAGATGGGAT
GGCTACCTTGATTTTACGGATGAAAAAAATAACAAGGCTCAGAGAATCCAGGTCATTTAACTCTTCTGAG
CTCTCCATTTTCCCATGTACGAAATGGGTGTCAGTAGAGCTCCGCAGATTGTTGAGTGGGTGAGGGGGTG
ATACAAAGCGGTCAGCAGTTCTGGCACAGGAAAGCGCTCGCGAACTTCCTGCGCATCATTATTCTGGCTT
GTGCTCATGTAGCCTGTAAGTGGCCTGGCCAGGATTTGAACCTACAGCCTTCCATCATCCCCCTGCACAA
CTCCTGCCACCCCATGCTGCCTGCCTCTGGGAGATTAGGTGAGCAAAGGGGTCTTGGCCATGTCTTTCCA
TCTGAGGCACTCAGTACAGAGGGTGAGGGGTCCCTGAGCCACCTCTGCTGCCTGCCCTAACTCCGGGCTG
TGATGAAGCAGCTCTGTTGGATGAAGCAGCCCTGGCTCCGATGCTCTTCCTCCCCTCACCTTCCTTACCC
AAAGGATGAGGTTGGAATACAATTGCAGTGTCTGTGCTCACTAATTTCATTTTCTGTGTCTGGAGTAATA
GGGGCCCTCAAACTTATTATGCTTATTTGAATTTCAATAATAAGCAGCCAAGCGGGAGACTGGCATGGGG
GCCGGGGCCGTGCTCTGAGGAAGGCCTGGCTGCCCCAGCTGGGGAACAGCTGGGTGCTTCCGAGGAGTGG
CCTTCTCTCCCGGGAGCTCGGGGTTGGTCAGCTGGTCAGCTATGACCAGGCAGAAGCTGACACTGACCTG
ACCCAACCTGGGCAGGCCTAGGAGAGCTCGTCCCCAGACCTTCACCTTGGAGAACCAAGTAGTAGTGAGA
ACAGTGCCGCGGGGCTGGCCCAGATCATCGGTCCTTTGGACGTCTTCTTCCATAAATGAGTCATTTATAT
CACACTCTCTTGTCAAGAGGTGGAAGTCAGTTTCCAATGGGGACCAAATTGGCCCTAATTTTTGTTCACC
TCTGGTACTGAGAGGTAAGGTGGGGGTGGGTGACATTTTCAAAGGGGCTGTATCCCTAAATGAGATAAGA
CCACTCCCTTGTGGGTGGAGACACCCTTAGCCCAAAGGCTTGAGTAGTTGAAGAGCTGTAAACAGTGGCT
ACCAGGTGCCCCAGGTACCCAGACGATGAGCAAAGCCCCAGAGGGATCCGAGGAGGTGACACCAGCATTT
TCCCCTGACTGGTTCTCGCCCTCAGCCTGGGAATGTCGCTGAGTCTTTGGTTCTTCCAGAGACCTGTCTT
TTGGCTGCCAGCCTTTGCATAGTGTCCACTCCTGTATCTAATTCTCAGGAGACTGAGGTCTGGCCTAGGC
GGGTCTCTCCTCCGACTCAGTTCCATGCACTGAATTTGACCCCTGGGCCCAGATCAGACACAGGGTCTTT
CCACGAGGCCCTCACAGAAGGTGGAGCTCTGAGCGGTGTTTTTCAAACAGGATTTTAATGGTGCAGCAAG
AAAAGAAAGACTCCAGGATGACTGAGGTTTAGGCGTCACTGGGTTGAAACGGTTAAAGAGGCTTCCTTCC
TGCAGGGCTGCTCAGAGCCTTTATTGGCCGCTGTATTGTGTGTTCACACACACAGAGATGGAGACTGGAG
CTTTTCCCCAACACTCAGATCTTTGTTTCCCAGAAGCCTCTCCAGGGAGAAGAGCCCAGCGTTTCAGAAA
CGCTGGCTTGAAGGAGCCCTGGGAGCCTGCCCCCCAGTTTCTCTGTAGCCTCACGATTGTGCTTTCTGCT
GGTGAGGGAGGTGGCTGGAGGTGGGAAGCGCCCAGGAGGCCCGGCTCTCCTTGAGGACACAGCTCTGCTC
TTACCCTTTGTGCTTAGTGCATCCCCAGGGCCCTCGGGGGAAAGTCCAGCCCCCTCTCCCTGCCCCTCCA
GGCCCTCTGTGATGAGTTTCTTCCCTGCTCTTGTGTGATTTCCTGTGTGCGCCTACATCCCAGGCAAACC
AGGGGGTTCCTGCTCTTATGGGCTGCCGTCTTCTGCTCATGCTGGGCTCAGCCTAGATACCCTCCCCTAC
GCCTTGCACATAGTTCGGGTTTCACCTGAGCTGCACCCCTTTCCAGGAAGCCTTCCTGATTGTCCTGTGC
TAGCTTTTCATTTCACTGCTCCCCAGCATTTTGTATCAAATCCAAATGCCTTCTGAGCTGACAGCATCTC
ACTCCCTGACAAGATGTGGGCCCCTGGGGAGCGGTGCCAAAGTCTGGTTAATCCCAGGGTCCCTGCTGCC
TGCACGGAGTGGTGCTGAGTGGAGACTCCAGGAAACCCAAGAGCTTCACCTCGGGCTTGCCCATCGGGCC
CTGCAGCTTTGAGCAAATCGACCGAAGGTGCCTACTGTGTGGAACCCAGCAAGGGGAGCCATGCAGACCA
GGGAGAGGAGGCTGGCATGGGCAGGGGCTCCTCCCTAGAGGCTGCTTGGATTTAAGGCGGTTCCCTCATG
CCCAGCTCCTCTCCTTCCTTCCCATATTCACCATAGAGGTTTGGGTCCCCTCTCCCCTCTGCCTCTGCCC
CAGGACCACCCGTGCAGACCACCCCCGCCTGCCAGACCAGTCTCAGGGCATCTGATGGCTTCCCTGCCTG
CTCCGCCCACATCTCAGGCCAAACCCCTGGACGTCAGGACACTGCACCATGCAGCCCACTGTATTTTCAG
TCTTTCCTGGAGCCCTGCCCCCGCCAGGTGAGCTGGCTGCTTTCTTGGGAAGCCAGGACCTTCCTGGCCA
CCTCTGTCTGCCCTGTTGCCTGCGCCCCTGCAGTGCTCCCACCAGGCTTTCTGAAGCTGGCCTGGCCCTG
AGACCCCCAGCCCTGCCTCTCTGTGGAATTGTTTCCTAGCTGGTCGCTCCGTCCTTCCGAGCCTCCCTCT
TTGGGGCTGCAGAAAGCGTGGTCTGAGCTACACAGCACTGAGCTCCACCCTGTCCCAGGCTGGTAGTTCT
TTTTTTGTTTTGTTTTTTGACACAGGGTCTCGCTCTGTGGCCCAGGCTGGAGTGTGCGTGATCTCAGCTC
ACTGCAACCTCCCAGACTCAAGCAATCCTCCCACCTCAGCCTCCCAAGTAGCTGGGACCACAGACATGCA
CCACCATGCCTGACTAAATGTTTGCATTTTTGGTAGAGACAGGGTTTCCTCGTGTTGCCCAGGCTGGTCT
TGAACTCCTGAGCTCAAGTGATCCACTTGTCTCGACCTCTCAAAGTGCTGCAATTACAGGCATGAGCCAC
TGCGCCTGGCCTGGCGGTTCTTTATTAGCACAGGTCCAAGACTTTGACTTCCTTATTGCAGGGCAGATAT
GGATGTGTGTGTCATGACCTCCACCACCCGCGTGCACGAGGGGCACAGCCTCTTGCAGGTGTGTCACGTG
GCAACCTGGACCAGGGATCTCCCCAGCCCAGTGAGGGGCCAGCCTCATCTCCATTCTACAGATGAGAAAA
ATACATACACTATTTAAAAACACTTCTATCCAACACAGCCACACACACACATTCATATGCATACTCACAC
ATGCTCACTCATGCACTCACACATACACTCACACTCATGCACACACACACATTCACACACACACACACAC
ATTCACATGCATGCTTTAACTCGAGGGAAATGAACTCACAGGACTCTAATTTCCTGATGCCATAGGAAGA
ACAACGGGCATTCCTGTCATGTTTTTCATGGGAAGCTGATTCAGAGAGGCTAAGGGGCATCCCTAACGTC
ACACAGCTAAGAGGCAAGGCTGAGGTTTGCACTTCCACTGCTCTGACTTGGAAGCCCAGTGAGGCGCTCA
AATTAAAATTAGAAACCTTTTCCTGTTGTCCAGGCAGAAAACCGGGAGAGGGGAGAGAACAGCCACTAGG
GCGAGGACAGAGCGCAGCCACTGGGCAGCCGGGAAACCGAGGCTTGCGCCTGGCTGCAGACTTCCCTCTT
CAGGCCCTTCTGGCACCATCTGCTCCAGAACCCACAGCTCCCATCCGCCGCTGCCTGGGATGAATGGTGC
CCTGTCAACAGTGATACACCTGCTGTTTAGTGGGAAGAGAGGTGCCAAGAGTGCACGGGATGCCCGGGTG
CACAGAGGGGAGGAGACAGGGCACAGCCGAGCTGCCAGGCCAGGCACAACTTCTTGATGAATAGAGAGGT
GTGGAGCCGCCCGTCGTTCATGTCGATTCTCTCAGTCAATCAAAACGCTGCCACAGCAGGCTTTGGGATG
CGGCGTCTCGATGTGTGTGGGCGTGTGCAGGGCGGTTGCTGATATTAGTCATGAGCGCTGGCCCAGGAAT
CAGAGACGGGGATGAGTCTCAGCTCTGCCATTTCTTGGCTGTGTGACGTCTGGGCCTTGATTTCTCCATA
TGGAGATAGAGAACCCCTTCCTTCTCTGTCCCCAGAAAAAGTGCCGGCCACACTCTCCTTGGCCTGTCAA
CAGCGATGCACCCGCTGTTTAGTGGGAAACCATCTTCCTTCATGAGGTCAAAGCCCTCACTTTTTTCTGG
GAGGGATGACTGTGCACCGTGAGTTAGCCTTAGAGTCAGGCCCAGGAAGACATCAGCCACCTGCACCCCC
CCGCCGCCCCCCACCCCCCTGCCGAGGCCTGGGGAGTCACAGCTCTTCCTGATCTTGCTGTGTGGCCTCG
GGCAGGGCGTTTGCCCTCTCTGGGCCTCAGGCACTCCATCTTGACAATAAGGCCATTGCACTTGCTATTC
ACATTGGGCCACCTGTGCCAGCCATCCATGACAGGGGTTCTTTAGGTAGAGACAAATGGCCTGCAGGGGC
GGGGACCCCCGGGGCATGGCCGTCCACTGCAGGTCCCAGGAGGAGCCCCAGCCTGGCTGGCTGCTTCCAA
GAATAGAGTAGACAGAGTCTGCACGGGGCTGCCAGTGGGCCACTCCTGCACGCAGGGCCCCGGGCCCTGA
GCTCATCAGTGAAGCAGGTAATTATGTGTGTGCTTTGTTCCTGCACAAAGGCACTCTCAGAGAACTTCCA
AGAGGCTCTGCTTCCTTGCTGATTTGATTTTTTCAGAACTGGAGTGTGAAAGTCAAGCTGAACCTGCTTA
ATTGTGCCTGCGAAGGCTATTCAGAGAGACTGCTCTTGGAAAGAAATCAGGACAATTAGCTCTTGGCTGC
AGGGAGAGGGGGAGCGAGCGCTTGATGGTGAATGTCAGCCTGTTCCTGGGAGAACCAAAGGGCAGAGCTG
GGCAGAGTGGGGAAAAGACGGGCGGGGGGGTGGGGGGGCATCTGTAGCTGTCTCTGGGGCTGGGGCCAAG
CCCACCACCTGCAGGGGGCACCAAGCTCCACATGTGGGTGTGGGGCAGCCAGGCTGGGAGCAGAGGCCAG
GTCCGACAGCAAGCTCAGGGCCACTCCCCTCAGTCCAGTGAGGGTTGGTTGTGTGATCTTGGGCAAGTCA
CATGGCCCTCTCGGCCTCAGTTTCCCCGGGTCTGCAAAATGAGTGCTGTGCAGAATGAGCAGATGGAGCC
CACTCATCCCGGGCAGTGGCGGGTGGGAACTATGGGGTCCACAGCAGATGGTGCCAGAAAGGCCTGAAGA
GGGAAGTCTGCAGCCAGGCGCGAGCCTCGGTTCCCCGGCTGCCCAGTGGCCGCGCTCTGTCCCTGCCCTA
GTGGCTGTTCTCTCCCCTCTCCTGGTTTTCTGCCTGGACAACAGGAAAAGGTTTCTAATTTTAATTTGAG
CACCTCATTGGGCTTCCAAGTCAGAGTAGTGGAAGTGCAAACCTCAGCCTTGCCTCTTGGCTGTGTGACG
TTGGGGATGCCCCTTAGCCTCTCTGAATCAGCTTCCCATGAAAAAGATGACAGGAATGCCCGTTGTTCTT
CCTATGGCATCAGGAAATTAGAGTCCTGTGAGTTCATTTCCCTCGAGCTAAAGCATGCATGTGAATGTGT
GCGTGTGTGTGTGTGTGTGCATGAGTGTGAGTGTGAATATGTGTGTGTGCATGAGTGAACGTGTGTGTGA
GTGTGCATATGAGTGTGTGTGTGTGGCTGTGTTGGATAGAAGTGTTTTTAAATAGTGTATGTATTTTTCA
ACCTTTTTTGAATGGAGCCCAGGGTGTATTTCCCAAATTCTTTTTACATTATTTTAAAGAGAGGCAGCAG
AGTGTTATGACAGAGAACCAGCTATGGAGCTGGCCTGAGTCTGCATCTGGGCTCCACCTCACCAGCTGTG
TGTGAAACCACTTTGTTCCTGTTTTCTTATTTGTAAGTAGAGATCATATCATCTATCCACATCTCTGCCT
AGGTGTGTGGACGGCTTAATACACTTGGAAGCCTCAGAACAAGGACTGGCAGTAAGTGCTCAATACATTT
TATCATCATTGTTATTTTTGACGCTGAGGGTCACTGTAACGACCAATGAACCAGCCAGTGAAGTGGGATG
AATCCATTCAGGAGCACACAGGGCTCGGGTGCACTCAGTGCTCACGGGCGAAGTGAGCAGGCTGGCATCT
GTTTGGATTGGTCTCTGCTTGAACCCTGTTAGTTGTTAAACAGTTTGAATGCCATCCCAGGGTAGAAGAG
ACAGAAACTTAAGGGCTACTTACAGATGCAGGGACTAGGGGAGGGATGTGGGTGTGGCCAGAGAATCCAA
CCCTGGGGACCACCCATTTCCTATCTGGGCGGCCAGGGCCCTGCAGGAGGTGCCCCCGTCACTTACAAGC
CAGGGCCCCCACTGCCCCTCCCTGGTCCTGCAGTCCATCTGGGATGTGAGGCTACTCAACCAAGCTCAGT
TTTTGCAGCCAGGCGCACGGGGGAAGGCTGCCACTGGCTGCCATCACCGACTGCGAGGGGTTCCTCATTC
TCAGCTGGCTTTACCCTTTGCTGCTCCTTGAATAAAGTGTTTTGAATTCTGCCGCACAGAGGGGACCCCG
CTTTACTCTTTTGGTTTCCTTTTGCCCGAACACAGCTCACTACAGCCTCAACCTCTTGGGCTCAAGCCAT
CCTCCCACCTTAGCCTCCTGAGTAGCTGGGACCACAGGTGCACATCACCACACCTAGCTGATTTTTTATA
TTTTGTAGAGACGTGGTTTCACCATGTTGCCCAGGCTGTTCTCAAACTCCTGAGCTCAAGCAATCCGGCT
GCCTCGACCTCCCAAAGTGTTGGGATTCCAGGCATGAGCCACTGTGCCCGGCCTCTTTTGGTTACCTTCA
TCGGAACACTTGCAGGGCCTTTGAGAGACCCCATCAAACACGTTTCCCTTTGGGCACCTACACTGAATCC
TCTGGGATGAAATTTCAGCCAGGAGAGGGACTGAAGTAGAGTCACATGTGGGGACCTCCCATTAGTGGGC
TCCGTAGCTGACGGTCCCAGGACAGGGGCCCTGTGTGGAAAGAAGGGCAGACCTAAGGGAAGCCAACAGG
GGTGAGGACCACGGCGCAGGGGCCACATTTAACCGGCTGGGGACCAACTGTTTCTAAGGCTTCCGCCGCT
CAGCTGGGCAAAAGGGAGATAAATATTGTAAAGTTTACGGGAAATAACAGTTTTAAACAAGCTCTGGAAG
TGTAATGTGCCCACAGGCATTCATCATCATCACCGCTCTCATCCTCTCCTGGGTGACCAGGGCGATGAAT
GACCCAAAACACCACACACGAGGAAAGGCAAAGAGATCAGAGACTGGTTCACCCAGAGAGACCGGGATGC
TGCCTTCCAAAATGGAAGAGCTGTGCTGGAAAAGCTGCATTTGACTCACTGGAATAAGTGCAGGGGTCCA
GGGCCTGCTGATTGCTTCCTGGTCCCTGTGCACATGCCCCGTGGTGACTCCGTACAGTGCTTCACAGATC
TTTTGCTGAGGAGCTGGGGATGGGCAGGGAAGGAAGCCTGGACTGGGTGCCTAGAAGCTCTGGGCAGCAG
CCGCATCAGAGGCTTTTGAAGGCAGGAAGGGCAGCCAGCGGCCCGGAGGGGAGCACAGCAGCTGCTGGTG
ACAGCTTGCTGGGTCGTCACAGGGGCTCTGGACGGTCCTTCTGCCCCGAGGTTTGGCTTAGCTTGGTGAG
GGCAGCGTGGAGGACACCGTTCCATCTTAATGCCTTTCCAATAAAGCCTTGAAGACGACAGGCCCCATTT
CCTGAGCAGAGCTGAACAGTTACTTTACACTTCATCTAATTGATTAAAATGACTCCTCTAAATTAACCAG
GCCTTCCAGAGCTGAGTGCGGGAGAGTGAAGTCCAGAGACCAGAGCCGGCTGCAGGGGCAGGCCGGGGGC
CCACAGCCCTTCTCCCGGGCCCTGCTGTCCACCAGCCCTGCTCGCACCCCAGGTTCCTGGTGGCCGATGC
GCTTAGGTCAGCCGACTGGCTTCTGTGCTCTGCCCCTGAACACCAAGCTGCCCTGAACAGAGCCTGGTCT
CTCAGGGTGAGGGTGGGTCAGGGATACCGCGTGTGCTCCCTGCTGTCTGCGTCCGTGTCTGGCAAATTGG
TGAGGGGTCAGGCATCCCAGGTCTCCTTTTATCTTCCACACTGCCCCTGGGGGTAGAGAATTATGGTCCC
ATTTCACAGCTGAAGAAACTGAGGCCCGTCTGCGATGCGTAGCTAGCAGGTGCAGAGGCAGGGATCAAGG
CTCAGCCTGTTGCCTGCAAAGCCCTCGCCCTGTTCCCTATGGCGCACCAGCTGCTTGGATGCTCCCACGC
AGCAGTGCCTTGTCATCACATTCTATTTGCTGAGCGGCGATGGAACAGGCCCTGCGTCCCCGCCTGTGTC
CTAAGCACTCCACAAGCATGAGCGTGTCTAGATGGTGATGGTTTGCTCATGGTCTCTCTCTCAGAGCTTT
TACCCTGGCGGGGTTGGGAGCGTGGCAATGGGTCACCACTGACCCTGTTAGGAAACAAGTGTGTCTGTAC
GTGCCACTTATGATGGGGACAGGCCGTGGTCACTTTGCTGGGGCCAGTGTCAGCAGGATGGCAGATGCTT
TGAGAACACGGCTAAGAACTCTGCCTTCTGGAGCAGGATGTCAAATGCTGTTTGATTCAGGCATGTGACA
CCTGTCAAGAGCCCTGGCACAGCTGCTCTCGAGACACGCCTCGACTGCCACTCTCCCACCCCTGCGTGGC
ACCCTCCTGACTGTTTTATCTGCCTTGGTTTTTCTGGGTCTGGTGTAGCACCTGCCCCATAAGAAGCGCT
CAGTAAATGATTGTTGATAAAAGATTGAACCAATCAAGGAATGATGAGCCAGTGAAGGGCAAATGACTGG
AAGCAAAAGGCCCTCTTGATGGAATTGGGAAGAAGCTGATCCGAGGGCCCAGGACAGCCTTCTCTTGAAT
GCCCTGCTGCTGAGGTCTCACTGCTCGGCTTGGACTCGCCTCTCGCCCTGCCTGGCTGCAGAGGACAAAC
AGTGGGGTGGTGGGTGTGTGTCCGTGCCTGTGCGTAGGATGTGGTAGCTGGTGAGTGTCAGGGCTCTGCA
CGCTGCGCCCTGCCTTGCTTCTTTCTCTCCTCTCAGGCTGTGTGTAGTCCTGGGCCAGGTTTTTTCAGCG
GGCGTGGTGGTGGGAAGGTCCTCTGTCCCTTGCTCATCCTGTGTCCTGGCTCTTCCTCCTTGTGTCTTCT
CTCTGGGCCAGGAGGAAGTGGAGAGGTGGGATCAGGGCCGATGTCCCCAGCCTGGGTGGCAGTGTACTGG
ACCATGGGTTCCCACCCAGAACTCTTCATGGCAGAGACCTATGGCCTGCCTGTCCTCATCTGAAGATAAC
TTGGCCGTTCTGATTTCTCTTCCCACACAAGGCCATGGTGGCTGCCTCTGAGATTTAATAAGCCCTTAGG
TCAAATGTCTGCTTGGCCAGAGGAATTGTCTCCCGGGCTTTCTTGGAGACAGCTCTAAAGCATGCAAACT
ATAGTGTCAGGAGGAAAAGCTCTTCCTCTACCTACTTTGTTCTGTGTTTGGGGGTCTGAGAAATTTAACA
GTCAACAGATCAACAGTAGAAAAGACAAAGGCTTTTCTGTTTTTTTTTTTTTTTTGCCTTAAGCAAAAAT
CCTGCTAGGTTGGTTTAGCCAGAGCCCCCTCATTCCTGGTGTTTCCCCTTAGTAGTTTTTCCTCCACTGA
TCCCCACCCTGCTCCGGCTATTAATTCCTACTTTTCCTTGCTGTATATGTGGCTGAGCCCAACCTCTCTC
CCCAACTGCAGAATCGCATCACAGTGGGTCCTATACCTAAGGCGATAGTTCCTTCCCCCCACCCCTGACA
CCCCCAATAAAATGTGCCTTCTTACCATCATTAACAAGCATCATTGAATAATTTTGATTTAATAGCGGGT
TCGAGAGATCTCCTCCATCTTCATCCTGGCAGGGCTTCCCCTCCACCCCAGAAAGGAATTTATGGCAGTT
TCGCTCTGGGCCTCCTTCCTGGGAGTGAAGCTGCCTCTTCTTGAAGAGGGGGTTTATGGCAGCCTCACTC
CCAGAAGTTTCTGCTTTTAGTCAGATAAGGGAAACTCCAAAAATGCTTCTTTCTGGATCTGTTGAATCTC
AAATGTCTTCAGTTTAAAATAATCTTGATACCAACTCTGGGGGTTGGGGTGGGTCTCACACCACTCTCCT
ATGCATCCCTACCTGCTAAAAAGATGTGCCGGCTCTGGCCTGGCCGGCTCCTCCACCTTCCAGCCACCTG
TCCTGTTTATTCATTTCTTCCCTCTCTTTTCTCCTTTTCTTTTCCATTTATCCAGTCATTCCTTCCTTCT
ACCCACCCACCAACCTGATCACCCACTCATTCTTCTCTCCTTCAATCCAACCTTTCCTCAGTACCCAACC
TGTGCAACTGTACCATGGACTCCTTCAGGCAGTGGCTCCCAACTCCCATCACAGAGCAAATGCTCAACAC
ACACCCGTGTTTCATCTGTTATTCAACAAACACTGATCACTTGCTTCTCTTAATTATTATTATAATATTT
ATTTATTTATTTAGAGACAGGGTCTTGCTCTGTCACCCAGGCTGGAGTGCAGTGGTACAATCACAGCTCA
CTGCAGCCTCCACTTCCCAGGCTCAAGCCATCCTTCCACCTCAGCCTTCCAAGTAGCTGGGACTACAGGC
ACATGTCACCATGCCCAGCTACTTTTTGTATTTTTTTTTTTTTTTGTAGAGATGGGGTCTCACAGTGTTG
CCCAGGCTAGTTTTGAACTCCCGGGCTCAATCCTCCTGCCTCAGCCTCCCACAGTGCTGGGATTACAGGT
GTGCGCCACTGTGCCCAGCTGCTTCTCTTTGTAAGTTCCCAAGTTGAAGCACCCCCTTCAGGTGTAGTTT
TAGACGTGCAACATGAGGGGAAATCTTAGGTTAATTGCTGGGTCCAGAATTGCTCTGAAAGACAAAGACT
GTCTTTGTTCTAGAAAAGTGCTCATAGGCGCTGTGAAGGCCTTGATGTCCTCTGGTGCCAACGCAACAGA
GAAGCCAGCAAAATGCTCTGCATGGGACAGGTTCTGGTTTTTGCTACAGAGACTGTAAGAGATGCAAAGC
CAGGACGGTGAGGGTGAGCTGGGGTTGGGGAGGCGCAGGGGGGCTCCCCAGCAGAGGGAGGGCATTTGAA
GACGGCGGCTGCTCCTTGGAAGCTGGCAGGCACGGCCACAGAATATGCGCCCCTTTCCTGGCCCCCTCGA
GGTCTGCACAGCCCTGAGTGCTCATGCCATGAAAATGAGTGTCTCTGAGTTTGGAGAGCTGGCCTCCGCA
CTGGGCTTCCTGAGGACGGGAGCAGGAGCAGGAGGCTGAGGCCAGGGGGGATGGCAGCCCCCGGGGATCT
GAGGAAGTCTGGGAGCTGGCTTTGAACTTCTGCCCACGCTGGAACTTGGGGAGAAGAGGGAGATGTGAGT
CAGGTTTTCCTAGTTCCTGAGGGCCTGGGAGGCCTTGGCTGGCATCCCGTTTACATAGCGAGTGGCCCCA
CCTGATGGTTCTGATCCAGATTCTGGTACCCGAGTGAGCTAGGCCACGGGAGCAGCTGATGCCCCTGCTG
TCCCTGAAGGCAGCATGGGAGGCCCCCGGGACTGGGGCTCAGGCTTTCCAGAGAGAAGGAGGTGCCTTTC
CCTGCCAACTTCCTAGCTTTAAGTCACGCTCCGGACATCCAGAGTGAGCACCTGCACCTGCCAGAACCCC
TTGAGCCGCCTCTACCTTCCAGGATGACCCATTCCCAGTTTTCCCAATTACCTTTCATATTTCCTCTTTG
GAAATGGAATTTGATTTTGAGGCTGAGCAGGTGGCTGGAGACATAGAACATAAATATATCATGACTTGGG
AGTTGACTTGCTTATCATGGAAATAAATGTCCTCCCTCCTCAAGAAGCGGTCACTTGGCCAGGTCACTTT
GATCTTGCCCCGTGGTGAAATCAGACGGTCCCTGGCTCGTGGGCGCTGGAACCAGGGGGGAATTTCAGGG
TGAGTCATGAATGCTAGGGGGCAGGGGTGAATGGGCTGTAATGTCAGCTTTGTTTTCCTGTCAGGCGAGA
GAGAGAGAGAGGAGGGGAACAAGAGAGAATGATGCCAAGGAGGCGCCTGGGCAGCTGATGAGCTCAGCCC
CAGGGTGACTGCGGTCATTTGGGTCGGCAGTGGGGACAGACATCAGCCCCAGCTGGGTCATGGGTCATTT
ACGGCCTGGGTCTCCCCCTCTCCTCCCTCCTCCTTCTCTCCAACCTGCTTTCTTGCTGCTGGAAGGGGGT
GTGCAGGCTCCCGTGTGCCTGGCACAGCAGGGGCAGCACAGGAGACTCCATGGGGCCTGTGTCCCGCACC
CCCACGCCCCCGCCCCCAGCCACAGCCCTTTGAGAGCACAGCGGAATGAACGCCTGATTAGGAATCAGAT
GCCAGAAAGAAGCTGTGTCTGTTCCAAAATCAAGAGACCAGGAGAAGTGACGTCCTTTAAAAGGAGAGAG
CTAAGTGACAGAGAGGGGGCTTGTCCCCAGCCCAGGCACCTCGGGGCTGCAAGCTCCTTTGAGATGCGGG
GCTCAGGCCTCATCAGGGGAAACGTGGGCATCTAGATGACCCTCCACACTGAGCAGACCCAGCACAGGCT
GCGCCACTCATCATTATAGGCTGCGCCACTCATTATAGGCTGCGGGGCCTGCACAGACCCCAGGCATCGA
GCCTGCGATGGGGCAACGTGTGGTGTGGAGGCCATACCCCTCCTCTGCTGGCTGGCAGCTTGGCCCAGCC
TCCTCACTGGTGAACAGTCAGCTCTGCCCCCTGGGCTGTCAGGAGGATTAAATGAGATAAGACAAACACA
GAGCAACTCCTTGCTAACAGCCATGCAGTACCAAGCAAGGCACAGCAAAGGGAAAGAGAAATCCAGTGGC
ACCAGTGGGCTGAGAAACTGTCGGGTTTGGCTGCTGCTGTTGTCTGCATCTCCCGCCTTCCTCCTGAGCC
GTGCTTCCAGGGCAGCCCCGGCCCTTCATGTCAGCTGGTGACATTTCTGCAATTGTTCCTAAAGAGGGGC
CTGTGGGTCGAGTGAGCTAAGCAGGGCTTGGCAAGGTGGTGTCCCCCGGTCAGTGCCAGAGTCTCCCTAA
TGTGGCCTGTGAGACAGAGCTGATGCTGAACAAAGGAACAGGGTGATCTGGGAGCAGCAGCAGCCGCTGT
CCTGAGCATCTGGGTCAGGACGACACGGATGCCACCCCAGGACCCCTGGCATAGGGAGCCGAGCAGGGCA
GCCGGGCAGAGGCAGGAATGAATCCTACTCAGCTGCAGAATAGTCACAGACACCTCTCCACCAGCAACGT
CCCTGAAACAGTCTTTCTTATTAAAAAATATTGAGTGTCAGTTATGTGTCAGGCACTGTTCTGGACACGA
GGTCTCAGGAACAAACAAAATATACAGAAACTTGGCCCTTGTGTTGCTCAGGATGAAGAGGAGAAGACAG
GAGCTGTGAGGTGTCCCCACCTGTCCAGAGGCTGGGAAAACTTAGGAGACGGTGCTGCTTGTTTAGAAAA
CCGGGCAGAGGAGCCCTGCTAGTCCAGGCCGGGCCAGCGCCCAAGGATGAGGGGAAGCACAGCTCCTTTG
GGGTCTGCGTGCATTTGAGCATGAGTGCATTAACAGGGGGAACGTCTGTGTTTACAGGGCATGCGTTTGG
GAGCCAGACAGACCTGGGCTGAGTCCTGCCCTACATACTAACTAGCCTGCTGTGTCGCCTTGCAAGGGGT
GAGATTTCTCTGCTCTAAGTCATGGGTGCTGAGGCCCACCTGTCTGGCGAGGGTCTGGGGGAGGTCGGAT
GAGATGAAGGAGGCTGGGGCTGGCACCGTGGTGGTCCCTGGGCTGTGCCTGTTTCCCTCCCACTTCTGCT
GCCTCCATCTGACCCTGCTCCGGAGGGACCAGGGGAGGGGCGGACGGAGGACACTGCTTCTGCAGCGCTC
CTTGTCTCCGTCAGTGATTTATAGGAAGCTGGCTCAACCGAGAGCTGAGGGAAGACGGTGAAGGCCCTTT
TGTTTTTAGTTCAATTTTGTGAGCAGAATGCTCCTGGGGCCAATAGATTTTTCCAGTAATGAAATTGTGA
AAATAATTGAATTATGCCTTTCCAGCTTCAAAGACAACCTGTGCCCTTTCCCCAGCCCTCCGCATGGCAT
TAGAGAACATTCGCCTCCTGCTGGGTCGGCCCCTTCGCCTCTTCCTTCTGTCTGTCGGTGCAGCCTCTGA
ATAGAATCCTGGCGAAGGGAGGGGCTGGGTGTGTTGTTGCTGCACCCAGGACTGCCCACATCAGTTGCAA
AATGCAATGTGGGGCCCTTTGTTGAAAAACAATGAAGAATTTCAAGATGGTGGCAGCAGAGCCTGAAACC
GAGCTCAGGGCCCATCTGAGCAGGGGCCCGGTGTGACCACACGGATCCCATACCGGTGATGCCAACCCCC
TGAGTCCCGGGGAACAGTGGCAAATCAGCACTCAGGAAATATCTGTTGAATGGAAAATCCAGTTTCCTTC
GCCGTCTTCCTTGTCTGTCCTCTCCTGCCGCCTCCATTCAACTTTCTCCCTTCTTCTCACAGCACTCGGC
AGTGTGGACTCTGGCTGCCTGGGTTCAAATGAGCTCACCACCTCCTAGTTGTAAGCTCTTCGACAAGTGA
CTTAAACACTCTGTGCCCAGTTTTCCGCATCTGCAAAATGGGGAGATAAATAGCCCCTACCTCCTAGGAT
CATCATGAGAATGAGGTGTGCGAAGCTTGGCCGGCATGGGTTCCATAGCAGGCACTCAGGGGTGTCGGCC
ACGAAGATTATTCTTTCTCTTCTCTCTTTGCCGTCTTATTTCATCTCTCTCCGTTATTTGGTTCCCCTGT
CCTTAGTCCCCTTTCTCCCCCAATGGCATCCCAAGATGCACAATAGTGGCAAGTGCCCAGCCTGTTTCCA
CAGCCTGATCCCCACCACTGCGTTGGCCAGTCACCCAAGAAGCAGCTGGACCCATCATCTGGCTCTAGGG
ATGACCCAGTTCCAGCACCCCCGCAAACCTCCGTCTGTCCCCCTACCTCCCTCAGCAGAGGCCCAGCCCA
ATGCAGGCCCGTGGCTGGATGGGAGTAGCTCTTCCCACCACCCCTGGGCAGGGCTCTGCGGAGCTTGGGA
GCCTCACCTGGAATCGGCCCTCATGCCTCAGTAGAGAAGGAGAGCGAGGAGAGAGGTGATGGGGCTCCGC
GGGCACCCCCGATGCACAGTCTCCTTCTGGGCTTCTGATGGCCACAAGGCCAGAAGACCTGCCCAGAAGA
ATTCAGTATAACCCAGTTCAGTGAAATTGGAGAGAACGAGGGCCTGCGTCTTCCGGGCAGAAGGCAGGGT
TCCTGCCCTCTGGAGCCCTTGGCCTGGCGCGGGCTGATTAGGACCTAGATCTGCCTGGGTGGCTGGGTGG
CCGAGTGGCGATTGGGCTGGTTCTGTACCGGGTGTGCTCCGTGGGGGGCGTGATCTGGCAAAGCCTTGGA
GGTGGGACTGTGGAGGCACCATTGATTGAACTGTGTCCCCTGCAATTCACATGTTGAGGCCCAAACCCCC
AGTGTGGCTGCATTTGGAGTAGGGCAGTAATTATGGTTAAATGAGGTCGTATGGGCGGGTGCTGATCCAC
TAGGATTAGGATCCTTATAAGAACCTGCCACCTTCTCTCTGCCACGTGAGGACATGGGGAGGAGGCGGCT
GCCTCCCACCCAGGAGGAGCCCTTACTGGACACTGGGCCCTGGCTGCACCTTGACCTTGGACTTCTAGTC
CCCAGAACTGTGAGAAGTAGATTTCTGCTGATTACGCTTTCCTGTCTGCGGCCTGAGCTAAGACAGCAGC
GCTTGGGGAGAAGCAGAATTTGAGGAGCTCCTCAGTGGCAGGCTGCCCTGGCCCTGCTGTCAGCAGAGGG
GAATGGCCATCCATGCTGGCCCCTCACCAGCCGGGCCTTCAGTGAGCTCCCCGGGTAGGTGAAGCTCTCC
CAGCTCTGTGTCCCCCGCCAAAGCAGGCCCACAAGCGAGCGCCTATGGGGTGGAGTGAGAGTGAGGAAGA
AACATTACCCGAGGGGTCACTCTCTTCAGAAGACCTCAATGACTGTAGACTACTGAATTATTTCCTTAAA
AAAAAAAAAAAAAGGCTAGGTATGGTGGCTCAGGCCTATAATCCCAGCACTTTGGGAGGACAAAGGACCA
CCTGAAGCCAGGAGTTCCAGACTAGCCTGGGCAACACAGCAAGACCCCATCTCTACAAAAAATTTAAAAC
TTAGCCAGGCGTGGTGGCACATGCCTGTAATTTCAGGTATTTGGGAGGCAGAGGCAGGAGGATCACCTGA
GCCCAGGAGCTAGAGGCTGCAGTGAGCTATGATTGCACCACTGCTTTCCAGCCTGGGTGACAGAGTGAGA
CTCAAAAATGGTTAAAAAAAAAAAAAGAAAAAATGTTGATAGCTACTATAAAGTTTCTCTTATGCAGTAC
CTCCTCATTTTACAGGAAATTTGGAGATAGGGAAAATAGAAAGAAGAGGAAAAGATGCCCAAATATACCC
AGAAAGTCCCTGCTAACATGCTGCTGTCGTCCTTCTATTCCTTAATCTAGGCATGTGGGCTTTTTTCTTA
TTTAAAAATGTTGATTTAGATATAATTACATGCAGAAAAGTGCACAAATCTGAAGTCTGCAGTTTGAGAA
GTTTTAGACATGTGCATACTCTGCACCGACCACCTCTGCTAGGATATAGAGCATGGCCAGTGCCCAGAGG
GCACCGCAGGCCCTGCCTAGCCACACTCACACTCTCTTCAGTAACCCCTCATTCTGATTCTATTGCCATA
GAATAGTTTGGTCTTTCTTAAACCTCATATAAACGAACCATGTTGTATGTGGTCTTTGTGTCTGGCTGTT
TTTTCCCCTATTTTAAAAATTGTGTTAAAATACACATAAACTTTATCATCTTGACCATTTTTAAGTGTAC
AGTTCAACGTTATTAAATACATTCATAATGTTGTATAACCATCACTGCCATCCGTCTGTAGAACTCTTTT
CATCTTGGAAAACTAAACTCCATACTCATTAAACACTAACTCTGTATTCCCTCCTCCCCGCAGCCCCTGG
TAAACACCATCCTACCTTCTGTTCATATGAATTAAAAAAAAATTTTATTTTAGTTTTTGAGACAGAGTCT
CGCTATGTACCCCAGGCGGGAGTGCAGTGGCGCAATCTCGGCTTACGGCAACCTCCGCCTCCCCGGTTCA
AGTGATTCTCCCCATCAGCCCTCTGAGTAGCTGGGATTACAGGCACACACCACCACGCTCAGCTAATTTT
TTTTTTTTGATATTTTTTAATAGAGACAGGGTTTCACCATGTTGACCAGGCTGGTCTCAAACACCTGACC
TCAAGTGATCCACCTGCCTCAGCCTCCCAAAGTGCTGGGATTACAGGCATGAGCCATTGTGCCTGGCTGT
GTTTCCTATGAATTTGACCATTCTAGGTACCTCCTATGGGTGGATTCATACAGTACTTGCCTTTTTGTGT
CTAGCTTATTTCACTTAGCATAATGTCTTCAGAGTTCATCCATATCTGTAGCATGTCTGAATTTCTTTCC
TTTTCTTAGGCTGAATAATATTTCATTATGGATATCATGGCATGTTGCTCATCCATTAATCAATCAGTGG
ACACTGGGTAGCATCTGCCCAAGTTTTAGACATTGGGAATAATGCTGCTGTGAACATGTGTGCACAAAAT
AACTCTTCAAGACCCTGTTTTCAGTTTTTTTGGGCATATACCCAGAAGTGGAATTCCTGATCATATGGTA
ATTCTACTTCTAATTTTTTTTCTTTTTTTAGATGGAGTTTTGCTCTTGTTGCCCAGGCTGGAGTGCAATG
GCGCAATCTTGACTCACTGCAACCTCCGCCTCCCGGGTTCAAGTGATTCTCCTGCCTCAGCCTCCCAAGT
CGCTGGGATTACAGACATACGCCACCATGCCCGGCTAATTTTGTATTTTTAGTAGAGACGGGGTTTCTCC
ATGTTGGTCAGGCTGGTCTCGAACTCCCAACCTCAGGTGATCTGCCCGCCTCGGCCTCCCAAAGTGCTGG
GATTACAGGCGTGAGCCATCGTCTACTTCTAATTTTTTAAAGGAACCACCACACTGTTTTCCACAGTGGC
TGCATCATTTTACATTTTGTATCTGGTTTCTTTTGCTTAATATTGGTCAGGGAGATTCATCAATGTGTAC
AGCACAAGTTTGTTTCTTTATAATTGCTGTGTTAAGGATTCCATTGTATGAACAAAACACAATCTATTAA
TTCCCCTATTGATGGACATTTGGATTGTTGCCCACTGTGGCTATTATGAATAATGCTGTCATTAACCGTC
TTGTACACATTTTCTGGTGGTCATAGGCACCTGTTTCTCCTGTGGGTATATTTGGGAATGGAATTGCTGG
GTCATAGGGTAGGCAATTGTTTCACTTTAGTAGATATTAGGTGTAAATTTTGATGTCTTTAAAATAGTAC
TGATTGAGCCGGGTACAGTGGCTCATGCCGGTAATCCCAGCATTTTGGGAGGCCGAGGCGGGTGGATCAC
CTGAGGTCAGGAGTTTGAGACCAGCCTGACCAACACAGTGAAACCCCATCTTTACTAAAAATACAAAAAT
TAGCTGGGCGTGATGGTGGGCATCTGTAATCCCAGCTACTCTGGAGGTTGAGGTAGGAGAATCGCTTGAA
CCCGGGAGTTGAAGGTTGCGGTGAACCAAGATCGCACCATTGCACTCCAGCCTGGGCGACAGAGCGAGAT
TTCGCTTCAATAAAATAAAATAAAATAATAGAATAAAATAGAATAAAAAAAAATATGGTACTGATCATCA
CATAAAGTTTTGAGGTCTGCCTTTTTCACTTAACATTAAATCATTACTATTTTTAAGTTAGAACTTTTAT
TTTGAGATAATGATAGATTCCCATGTAGTTGTATGGAGTAACACAGAGAGATTCAGTGCACCTTGTACCC
TTTTCTCCTGTGGTAACATCTTGTGAACCTAAAGGCAATATCATAATAACTATATTGATGTTGATTCAAT
GTCCTCAGATCTCCCTAGCTTCCTTTGCATCCATTCGTGTGTGTGTGTTCCTCTAGTTCTACACACTTTT
ATCACCTGCACATATTTGTGGGTCCACCACCACAGTTCCAATGCTACAAGGATCCCTCCTGTTTGCTTCT
TTCCTTTTCCTTCCTTCCTTCCTTCCTTCCTTCCTTCCTTCCTTCCTTCCTCTCTCCCTCCCTCCCTCCC
TCTCTCTCTCTTTCTTTCTTTCTAGCTGAGATTACAGGCATGCGCCATCACGTCTGTTTAATTTTTGTAT
TTTTACTGGAGATGAGGCTTCACTATGTTGACCAGGCTGGTCTCGAACTTCTGACTTAAGGTGATCCACC
CGCCTCAGCCTCACAAAGTGCTGGGATTACAGGCATGAGCCACTGCGCTCAAGCTTTTTTTTTTTTTTTC
TTTAGACGGAGTCTCGCTCTGTCACCCAGGCTGGAGTGCAGTGGCGCGATCTCGGCTCACTGCAAGCTCC
GCCTCCCAGGTTCACGCCATTCTCCTGCCTCAGCCTCCTGAGCAGCTGGGACTACAGGTGCCCACCAACA
CGCCCGGCTAATTTTTTTTTTCGTATTCGTAGTAGAGACGGGGTTTCACCGTGTTAGCCAGGATGGTCTC
AATCTCCTGACCTCGTGATCTGCCTGCCTCGGCCTCCCAAAGTCCTGGGATTACAGGCGTGAGCCACCGT
GCAGGCTTTTTTTTTTTTTTTTTAATGTGAAGTCTCACTGTGTTGCCCAGACTGGAGTGCAATGGCACCA
TCTCAGCTCACTGCAACCTCCACCTCCTGGGTTCAAGCAATTCTCCCGCCTCAGCCTCCCAAGTAGCTGG
GACTACAGGCACCTGCCACCATGCCTGGCTAATTTTTGTATTTTTAGTAGAGACAGAGTTTCACCATGTC
GACCAGACTGGTCTCGAACTCCTGACCTCAGGTAATCCACCTGTCTCGGCCTCCCAAAGTGCTGGAATTA
CAGGCATGAGCCACTGTGCCTGGCCACCCCTCCTGTTTGTTTCTAACACAATCATCTACCCCCAGCCTCT
GGCAACCACCAATCTGTTCTCCATCTTTATACCTTTGTCACCATAAGAATGGTCTGTACATGGAATCAAG
CAACTAGTAACCTTTTGGGATTGGCTTTTTGCAGTCGGCATAGTTCTCTGGAGAGTCATCCAGGTTGCTG
TGTGCTGTGATTTGAATGTTGGTGCCCTCCTAAATTCATATGTTGGAATCTCACACCCAATATAATAGTT
TTAAGAGGTGGGACCTTTGGGAAGTGATTAAGTCACGAGGGCTGTGACCTCATGAGTAGGATTAATGCCC
TTATAAGAGAGGTGAAGGGAGTGCCACTGCCCCTTTAACCACGTGAGGACACAGCAACAAACTGCCGTCT
ATGAATCAGAGAGCCCTCAACAGACACCGATTCTGCTGGCACCTTGATCTTGGACTTCCCAGCCTCCAGA
GCTGTGAGCAATAAGTTTCTGCTCTTTATAAATTATGCAGTCTAGGGTATTTTGTTATAGCAGCTGGAAC
AGACTAAGACACTGTGTACCGATGATTTATTCTTTTCGTTACTGAGTGGTGTTTCTGGATTTGGACATAC
CGCAGTATGTCTGGCATTCATCCTTTTTTTGTTTGTTTGTTTTGAGACAGAGTCTCACTCTGTCACCAAG
GCTGCAGTGTAGTGGCGCGATCTCAGCTCACCGCAACCTCCACCTCCTGGGTTCAGCTATTCTCATGCCT
CAGCCTCCCAAGTAGCTGGGATTACAGCCACATGCCACCACGCCCGGCTAATTTTTGTATTTTTAGTAGA
GACAGGGTTTCACCACGTTGGCCAGGCTGGTCTCAAACTCCCGACCTAGGGCATCCACCCGCCTCGGCCT
CCCAAAGTGCTGGGATTACAGATGTGAGCCACCACACCTGGCCTGACATTCACCCTTAAAAGGACATTTG
AGTGCTACCAGTATTTGCCTGCTTTAGTAAAGCTGCTATGGAGACTAGTGTATAGATTCTTTTGTGAACT
TACATTCACACAAAAATGCAGTTGCTGGGTTGTGTGGTATTTGCCTCATAACTTCAGATGCTTCTTGACT
CACAACATGGTTACTTCCCGACGAACCCATTGTAAATTGGCAGCGTGGCTGAGTGGGAGCTGCATCTCTC
TGCCTCTGTCCAGCACTGTGAGGGAAGTACAGTTTCTATTGAATGTGTATCACTTTCACACCATCATAAA
GTCAAAAAATCCTGAGTTGAACCATCATAAGCCAGGGATTGTCAGTATTTTTAGAGGAGCTCAGGGTCAT
AGGTTACTCTGCCAGTTACATATTCTGATGCAAACGTTTTCTGAAGCCTTTATTATTATGACATTCTGGG
GACCTCCATACCCCTTATTTTTGGGGATTAGAGCTTCCCTCTGTCTAATCCAGCTCTAGAGCCACCTCCT
CGGGAAGCCCTCCACCCAGAGCCACCTCTCTGTGAGAGCGGCCCCACCAATGACTTTCCTGTGGGATGAT
GGAGCCCTCATGCTGAGCAGAGGTTAATGCCATCCCACGGCTCCCTTCCCCCAGAGGAGGTCTGGGTCTC
AGCTGAGGCTTACAGCCTAACACATCTGGCTCCGGACATACTGGGAGCTCTTTACCTGAGGGTGTCCCTG
TCATGTAGACAGAGGCTTTTGAGAAAATAAACAGTCCTGAGAGAACCTCTTCGTCCTGGGGGAAGCTGGC
TTGGTCTGGTGAAGACTTGTTCACTTGCTTCCAGCAGAAAATAACTTCGCTGTGAGCCTGGAGGTTATTA
TAACTAAATCATTCTGTGAACTACACAGACAGGCTGGGCATGGCCATTGTATTTCCGTCACCCTGGAGAG
AAATCTGTGACCAAATGGTTAAAAAAAATTCCAAGTCATTCATTATTCACCCTCGCTGCATAATGCATGA
AGGCTGCGGGCCAGGCCCATTTATGTTTTCAACATTGGCATCAAATGTCAGCCACTGCCTCAGAGAGGCC
CACGAGGGCCTTGGCACTCGTGGTTGGCCCCTTCTCCCCTCTGGATGAACCTCAGGCCTCCAGGGCTCCT
GCCTCCTGCTCACTAGGCTCTCAGCCTGGATGGTCCTTCTTTCTCTTCTTCTATGAAGCCCTCTCCATCC
TTTAGGGCTTAGAAATCATCTCCTCCCTGTCACCTGCCAGGGCAGGAAGTCATCCTCCCTCTCTGTTCCC
CCTGTAACACTTTATTTTTATTTATTTATTTATTTATTTTTTTGAGATGAGACGGAGTCTCACTCTGTCG
CTAGGCTGGAGTGCAGTGGCATGATTATGGCTCACTGCAACCTCTGCCTCCCAGGTTCAAGCGATTCTTG
TGCCTCTGCCTCCCGAGTAGTTAGGACTGCAGGCACGCACCACCATGTCTGGCTGATTTTTGTATTTTTA
GTAGAGATGGGGTTTCAACATGTTGGCCAGGCTGGTCTTGAACTTCTGACCTCAGGTCATCTACCTGCCT
CAGCCTCCCAAAGTGCTGGGATTACAGGTGTGAGCCACCGCACCCAGCCCCCTGTGGCACTTTAGAGTAT
TGATAACCACCACCACTGTGATCATAACTAGTATGATTTATATAGTTTGTATTCTCTGCTGGACACTTAA
CTCACACTATCTCATTTAATTCTCATAATAGCCAGTGAGGCAGATATTCTATTTCTCAATTTTAAGATGA
GGAAACAGGCTTAGAGTGGTTAATTAATTTGCCCAAAGACATGCAGCTAGCAAGAGGCAGCATATTGCAA
TTTGCCTGCAGGATGGTAGCAATTGTCATCCCTTTTCTTCTCAATCATTCTCACCAGAAATGTATTAGTT
TTTGCAGCCTTTTCAAGGAACCAACTTTAGGTTTCGTTGATTGTCTCTGTTTCTTAGTTCATTACATGTG
TATTTTTATTTCTAGTCCTGCTTGCTTAGGATTTATTTTGCTGTTCCTTTTGTAATTTCTTGAGATAGAT
CTTAGTGCATTTGTTTTTAATCATTCCTCCTTTCTCCAGTTCAGGCTGGTCTTGAACTCCTGGGCTCAGG
CAAGCATTTCAGGCTAGAAATTTCCCTCTGAGTACTGCTTTGGTTGCATCCCTGCACATACAAGTTTTGA
TTGTAGGAGTTTATTATTCCATTGAAAATATTTTCCGATTTTCCTGGTGATGTCCAGGTGGGATTGTGCT
CAATCTGACAGACTGCACAGCTCTCTCTCTCTCTCTCTTTTTTTTTTTTTTTTTTTTTTTTTTTAAGACA
GGGTCTCAGCTCTGTCACTCAGGCTGGAGTGCAGTGTTGCGATCATGGCTCACTGCAGCCTTGACCTCCA
GGGCTCAAGGGATCCTCTCACCTCAGCCTCCCGAGTAGCTGGGACTACAGGAGTGAGCCACCACATGCAG
CTAATTTAAAAAAAAAATTGTAGAGATAAAGTCTCACTATGTTGCCCAGGCTGGTCTTGAACTCGTAGGT
TCAAGCAATCCTCATTCCTCAGCCTCCCAAAGTGCTGGGATTATAGGTGTGAGCCACTGTGCCTGGCTCT
TTTTATGATACTCTTTTCTGACATTGAGCAAATCATTTTCATGTCTGTCCCTCCCCCAGGATCAGTTTGA
GACCAGCCTGGCCGACATGGTGAAACACTGTCTCTACTAAAAATACAGAGACTGGCTGGGTGTGGTGGTA
CATGTCTGTAATCCCAGCTACTTGGGAGGCTGAGGCAGGAGAATTGCTTAAACCCGGGAGGCGGAGGTTG
CAGTGAGCTGAGATAGTTCCACTGCACTCCAGCCTAGCAGCCTGGACGACAGAGGAAGACTCTGTCTCAA
AACAAACAAACAAACAAACAAAAAAAAACCCAAAAAAAATCCCACAAAAAACAAAACTATGAACTAGGTG
GTCTAGAAACAATTATTTCTCACAGGTCGTTTTAAGCCACTGAGTTTGTGGTAATTTGTCACAGCAGCCC
TAAAAAATAAATATACACAGTTTTAATTGAAGTTGGGCTAAGAAGCTGGACGCTAGTCCCAGCTACTCAG
GAAGTGGAGGTGAGGGGATCGCTTCAGCCCAAGGAGTTCGAGGCTAGCCTGAGCAACATAGCAAGGCCTC
ATCTCTAAAAAATAAAAATTAAAAATTGGGTTAAGAATTTAGCAGCTAGTCCTTAATAGGATGAGCCATG
AGGACCGGCAGCTACATATCAGTGGTTTGAAGCAAATGGTTGCCAAGTCGCTCCTCTCCCTCCCAGGTCA
TCACCGTGACATCCTTTTGTCCAGTGTCCTTCCCTCCAGGGTAGCTCAGGTTAGGGGAAACAGCCAACAC
ATCCATGCAAGGAAATAAATGGCCACTCAAACGCAGACTCTTTTAAAAGTGGGAGAGTGGCTGGGTGTAA
TGGTTCATACCTGTGATCCCAACACTTTGAGAGGCCGAGGTGGGAGGACTGCTTGAGCCCAGGAGTTGGA
GACCAGTCTGAGCAACATTAGGAAGACCCTGTCTCTACAAAAATTACAAAAATGAGCCAGGTATGGTGGC
GCGTACCCAGCTACTTGGGAGGCTAAGGCGGGAGGATGGCTTGAGCCCTGGAATTCGAGACTGCAGCGAA
CTATGATGGCACCACTGCACTCCAGCCTGGGCCACAGAGCAAGACTCTGTCTCTAAAACAAAACAAAATA
AATAGAAGGAGGAGAGGCGTGAGCATTGAGAGCATGGCCAAAGAGCGGCAGCACTGGCTACCCAGCACTT
ACTAGCCACATCTGGGCCTAAGGATTTTATGTCCCTCAGGACTCACGGGGCTGATGTGCCATCTGACCCC
TCTGAGACCTGTGGGACTGGGCTCCGAGCCTCTGGGACACTGGAGGGGTGGAGGCAGGTGTCTGGGCAAC
ATCCAATAAGAAGCCTGTGACAGAGTCAACAGTGGCAAGAGCCCTTTGGGCCAGCCCGGCTCATCCCCTC
CTGGCTGCCTGCCCCTCCATGGCAAGGTCATTTTCCTTGATTCCGATCACAGCAGACCTCTGTTGCTCTG
TGGCTGATTCATTCAGAGAAGCAGGGTTCTGGCTGGGTATGGTGGCTTATGCCTGTAATCCCAGCATTTT
GGGAGGCCAAGGTGGGCAGATCACTTGAGGTCAGGAGCTCGAGACCAGCCTGGCCAAAATGGCAAATCCC
TGTCTCTACTAAAAATAAAAAAATTAGCTGGGCATGATGGCACGTCCCTGGAGGCTGCAGTGAGCTGAGA
TTGCGCCACCGCACTCCAGCCTGGGTGACGGAGTGAGACTCTGTTTCAAAAAAAAAAAAAGGCCAGGTGC
GGTGGCTCACGCCTGTAATCCCAGCACTTTGGGAGGCCGAGGCGGGCGGATCATGACGTCAGGAGATCGA
GACCATCCTGCCCAACATGGTGAAACCCTGTCTCTACTAAAAATACAAAAACAAAATCAGCCAGGCGTGA
TGGCAGGCGCCTGTAGTCCCAGCTACTGGGGAGGCTGAGGCAGGAGAATGGCGTGAACCCAGGAGGTGGA
GCTTACAGTGAGCCAAGATCGCACCACTGCACTACAGCCTGGGTGACAGAGCGAGACTCCATCTAAAAAA
AAAAAAAAAAAAAAAAAAAAAAAGCAAAAAAGCAGGGCAGCAGGGTTCCTAGCCCCGGCTCCACTGCCTT
TTCTGGCTTGGGGAGACAAAGCTTGGTAACATCAGGACTGCAAACATCCTGCCATTAGATCTTGGACCAG
CACCGGCCTGGTAGTTTGCTGTTTCATCAGGGGGCTTGCAGTTCATAAGCAATCCCTTCTTTTCTTTTCT
CCCAAAGCTGGGAAATCAAAACAAAACTTCCTTCCCTTCCGATATTCCTCTTTACTAAAAATTTGCGTAG
CCAACTCTCCTGGGAGTGGGGGGACCAACTTGGCTCAGGTTGGCTGGGATGGTCCTGTTTTTAGCATTGA
AAACCACAAAAGCAATGAAAGTCTCACGTTGTGGGAGGCCCTGAGTCCTGGGCAAACTGGGACTGTTGGT
CCAAACCGTCCCTTCCAGAAGAGGCCCACATGGCAGGCCCTTTGAGGCCTGGGGCAGGCGGGACAGAGGC
AGCACCCGCCTGGCATGGGGCTGAGGCCTCCTTGCAGCTGCCTCCCGGCCCCTTGTTCTCCTTCATGGCT
CCATGCACAGCTGAGGGGAGACATGAGGTCTCTCGGTCTCCATGGGTTTGGGGCAGGCCCAGAATGGCCC
TGAATCCAGTAACACCAACTGTCCCTGGAAGTGTCACCACCCTGGTCTGGGAGGAGCTCCATGAACATCT
CAACCATCCACTTCTTGTGCAGATGGGGAAACTGAGTCAGAAAGGGAGGAGACTGCCTTAAGAAAGATTC
TTGCAACTTGACTTTGATCCTGTAGAGTGTTTGTGGGTTTAGAAGAGCACAGGTCTGAAGATGGAAGACT
TGGGTTTCAGACCCGTCTCTGCCCTGTGCACCAGCATGCCCAGAGCAGCACTAACCCAAAGCCAATCTGA
CAAATGAACAAGTCATTCTATTTACTGGTTTCTTTGATCTATTTATAAAAATGAATATTTATAGCAAATC
CTGTAGGATGCGGTAGATTTGGAAGATTTCTGTGATGTTTTGTTTGACTAATGCTTATTTTCCCTTTTGT
ATCAGTATTTTAACAAATGCTTTGGATTTCCTCCACGCAGAGGAGAATCAGTATGCAGCTGTTAATTTTG
GCTGCTGACTCCAGGACAAGAGACAGAGAGAGAGCGTGAAAGCGAGACAGAGCGTGAGAGTGAGAGAGAG
AGAGAGAGGCAGGAGAGGCTGAGCGTGGGAGGGAGACAGACGGCATCGATTCATTAATATATTCAAAACT
ATATTCAAAAACTATTCATTTAAAAATTCTGGAATATATTGACTACATACTTTAAAAGACTTTTTTATAA
TGGGAAACTTTGAACATAGGCAAAAATAGAATAATAGAAAAGCCCAGCGTGCGACATCAGTGTCAACAGA
GGTCCATATGTGGCCAGTCTTGTCTCAGCCTTTTCCCCACCCATTCACTCCTCTCCCAAATCCGGATGGT
TTTAAGGTGATTTTAGCCATCGAATTCCATATGACTCTGTTCTCAAGTGTACTGGATACATTCTTGAAAA
TACTCTTGAACATATTCTTGAGGATGAGAAATTCTTACAAATGTATATTTTTTGTGCCCCTGTGTCTCCC
CTTCCTTGCCTTTCAAACTCCTCTCTCTGTCCCTTTGTCTCCTTTCCCCCACCCTTCACCTCCCCTCTCT
GTTCTCCCCAGTCTCCCCTAAACTCCAAATCTCTACTCTGACCCTCAGTCTCATCTTCTGGGTGACCGAA
GATGGGGCAGTGCAGCCCCTGCTGAGCTGACCCTCCTTTCTGTCCTTCCTCGTGCCGAGGTTCTCTCTCC
TTGACTGTTTCTCCTAGCTGAAGCAGTAGGCTGCTGGACAGAGGCAGGTCCAGCATACTTTGAATGTTGT
TATGAAGTCCAGTGGAGAAGAGCTAGCCTAAATTCGGCAGAAATCTTCAATATCTTTAAAAAAGAAATCC
CTCCATTATGGATCACTGTAAACTTGTATCAGTTGTTATAATCAATGAACACATTGACTGAATTGGCCTT
TTGATATATTGACTTAGAGCTGTGTGATTTTGGATGAGCCATTTTACCTTTTAGAGCCCCAGTTTCCATC
TCTGTGAAGTGGGGAAGTGTGGACCATAGCAGTGGTTTTCTTTTTTCTGAGGCAATTCTCCTGCCTCAGC
ATCCCGAGTAGCTGGGATTACAGGCGCGCACCGCCATGCCCAGCTAATTTTTTTTTTTTTTGTATTTTTA
GTAGAGACGGAGTTTCACCGTGTTGGCCAGGATGGTCTCGATTTCCTGACCTCGTGATCCACCCACCTCG
GCCTCCCAAAGTGCTGGGATTACAGGCGTGAGCCACCGTGCCCGGCCAGCAGTGGTTTTCAAACTGGTTT
CGGAAGCAGATTCATTCTTTTCCTAGCCAAAGCCTGGTGAACCGTAGTGTGTACAACAGTTAAAAGCAGA
GACCTGCAGGTCCACAGGAGCAGACGCTGAGACCAGCCTGCCTGGGGTCAATGCCCTCTAACCCCTCTGT
GCCTCTGCTGTTCATCTGCTGAATGGGTCTCATAGTTGAGCAGTGGTCGAGAGATTTCCTGGCATCAAAT
ACATGGAAGGGACTTAGCGTAGGTCCTGCTTAGCACATAGTAAGTGCTCAGCGAACTTACTTACCACTTA
TTACTTACCACCCCTGCCTGAAGCAGGGTGGGGCCAAGGGATTGGCTGGACCTCAGCCACTACCCCTCCC
CTCACATGGAGCCAGGCCCCACCTCCACAGATTGGGGGCTTGGGGACACGTCTTCTGTGCTCCATGCTCT
CAGGTCCCAGTGAGGCTGAGCGCTGAACCATCCAAGTTGGCAGGGCCAGGACAAGGACCCAGGAGCTCTG
GTGCCCAGGAGTCCCCCGAAGGGGGGCTCAGAGGAGGTGCGTGCGGGGCTGGTGCCGGTGCCCCCGAGGC
CCACGTGCAGCCCCGCTCTGTGGGGCCTTTGCCCAGCCTCCTGGTCCTTGCCAGCGCTGCATGGCGTTTC
CTGCCGGAGTGCTGGTCACTGAGGGCTCTCAGACAAGGAATGACCCAGGGGCTGGGCCCAGCCTCTCCCT
TGTTCCCTGATGCTGCTGGGGCCGCTCCTCTCTACCCAGCAGAAGGGTCCCGCAGGAAGATCAGCTCTGA
GGTTAATTGTCCTTCTGGATAGCTGCAGCCCAGTTGTCATGGAAACCGGTCACGCAGGGCTCGGTAGCAG
GACCCTCCTTCCTACCTCTGCCACGGTGCCGCAGGCTCAGAGGGGGCGTGGGAGCTGCATCAGGTGATGG
TAAGATACTACAGCCATTCTCCAACTGCAGGCACCTGGAAGGAGAAGGTGGCCCGGGGCCAACTGTGCAG
TGAGAGAGGCTTTTTCTGCGTCTCCCCGCAGCTGTCTTGTTTTCAGCAGTGGCCCTGGGGGAGATGTGGA
CGCTCTGAGGCCTGGGGCTGGCTCTGTGTGTCCAGGTCTGTGTGGGGGTCACTGAGAGAAGGGAAAGGCA
GGGGATCTGGCCCCATGTGGATCTTGGTGGCCCTGGCACTTTTTTACTCTGAGCCCAGCCTTCCTTGTGT
GTAAAACAGGGATTGTGGTGCCTACCTCTTGGGCTTGCCCTGCAGATGGGCCGGGCTGAGCCACACCACA
GCGGCTGGGCAGGTTCAGGCCCCTTCTCACCTCTGCTGTCCTCCAGCACCATGATTCGGTTGGGAACAGA
GGAAGGCGAGGAGAGCCATCCGCTTCCTGCTTCTGCAGCATTCGGCCATTTGCCCAATGCTCCCTGATGC
CACGGTTCTCAAAGTGTGGTCCCTGTCCCTGGCCTGGGAGCATCAGCTTCCTGTGGGGACTCTAGAAATG
CAAGTTCTCCGGCCCCACACTAGACTGACTGAATCAGAAACTCGGGGCGGTGGGGTCTAGCGATCTGTGC
GTTAACACATACTCTAGGGGGTTCCGATGCCCCTCGAGTTTGAGACCCTCTGGTCTAATGATTTATGGGT
GAGACACTCTGCGCCTGCTTCCCTGAGGACCCCGAGCTGCAGCCCCAGGGCTTCCCCCTCCCACTTTGGG
TGAGTATGAGCAGGGCCCAGGTGGCTGGGGTGCAGTGGGCAGCCCGGTGGTCCTGCCTGGGGTCTGGTGC
TCCCTCGGTGTCTGTCAGCTCGGGCTGCTCTAGCAGAAGGCCACAGAATGGGGGCTCACACCGCAGGAAT
ATATAGTCTCATGGTTCTGGTGTCTGGAAGTCTAAAATGAAGGCGTTGGTAGACTCAGTTTCTAGTGGGG
CCTCTCTTCCTGGCCAGCAGGTGGCCGCCTTCTTGCTGTGTCCTCACATGGACTTTCTCTGTCCATGCAT
CCCTGGAGTCTCGCCCTCATCTGGTGGTCCTTTGTAAGGACACCAGTCCTACTGGATTAGGGTCCCACCC
TTAGGACCTCATTTCACATGAATCACCTCCTTAAAGACCTCATCTCCAAATACGTCCTGTTGAGGAGTTG
GGCTTCAGCATATGGATTTGGGGGGACACTCAGTTTCCTTGGGCCTCTCAGCTCCTGAGGGGGTCATCAT
GAGCCACCTTCCTGCTTGAGGGGGATAAAGGGCAGCTGGGACCCAGGGCCTGGGGCCTTGGGCCGAGGCA
TGGGGGGCATTTGTGGGCCGGTGTTTGAAATGCTCCACCAGCACTGCAAACACACCAGACCCCTGAAGAG
AGGGTCAGGCGCTCAGCTAGGAAGAGGGCGCTGCGGAGAGAGTGGTGTGTGTCTTCCTGTGTCCTCCTAG
GAGCTTCTGTCTGAGAAGTCAGAAGTCATGAGTTCCCAGTCCTGGCCGCATTTGGAGGCTGGATCATTGG
AGGGAGGCGCCGGCGCCCCATGTAGCTGATGTTGGTGGAGCATTGGCTGAGGGCCCAGAGAGCCATGCTG
CTGCCTCCCACACATCAATCACTCAGGCCACACAGTCACTGGTGAAAGAGGGCACACAGGTAATCCTCCA
GTTCTTGAATGGGGAATGGAGGCACAGGAGGGCTAAGCGAGGGCCCATGGCCTCAAGATTCAAACACAGG
CACTGTCTGGCCCCAGAACACACGCCCTTCCCACCTGGCCGAGGAGGTGCTCACAAGGGGCACTCCAGGT
GGATGCAGAGTGGGCCAGCCCCCTCCCTTCCTGCGGGCAGTGGCCCCTGCTCTTCAGGGGAGTCAGATGC
ATTGATTCTGGAGGCTGAAGCCAGGTGGAAGTGATCTAGAGGGGAGATGAATGTGAGGCGCTGCCCCGGA
GGAGACAGGAATGGCTCATCAGCCACGAGCCAGTGCCATTTAGAAACTGGCAGCCAAAGTGACGAGGCCA
CACAGGGCAGGAGGAGCAAGAGCACACGCTTGGAGGTGATGGTATTCCAGCAGTGGCATCAGCTCAGCCT
GGGCCAGGCCAATGAGCCCACCAGCAGCCTGCCCCTTGCTGGGGTGGAAGCCTGAAAGCAGACCACAGTG
GCTGCTTTCTTTGGTCTGGGGGAGCTCAGGCCAGGGGCTGGTTAGAGTCCCCAGCACAGCCCCATCCTCC
ATCCCACAGTGGGCAGCAGTGTGAAACTGGGCAGGGGACTTCAACTCTCCTAGTCTAGTTTTTTCATTCA
TGTCAAGGGAACACCACTACTGACCTCACAGGGTGAGGGTTAAGTCAGATGATGTGCTTAAAAGTCTTAC
ATGAGGCATGGTGACACTAGATGGGCCAGGGCTTCCTGAAGGCAGGGTCAACTCTGATTCATCTTGACAT
CTCCAGTTCCTGGCCCAGAGCCTGGCACATAGTGGGCACTTGAGAAGTGTCTGTTCCCTTCCCTCGAGAG
GGTCTTCAAGTGGTGAATGGAGATGATGGTGATAGTGATAATGGTGGTGATGGTGGTAGTGATGGTGATG
ATGGTGGTGATGGTACTGATGATGGTGGAGATGATGGTGATGATGGTGGTGATGGTGGTGATGGTGGTAT
TGGTGGTGATGGTGGTGGTGATGGTTATGATGGTGGTGGTGATGGTACTGATGATGGTGGAGATGATAGT
GATGGTGATGATGATGGTGATGGTGGTGATGGTGGTATTGGTGGTGATGGTGGTGGTGATGGTTATGATG
GTGGTGGTGGTGGTACTGATGATGGTGGAGATGATAGTGATGGTGATGATGGTGGTGATGGTGGTGGTGG
TGGTGATGGTGGTGGTGGTGGTGGAGGTGATGGTGGGGTTGGTGGTGATGAGTGTGATGATGTGATGGTG
GTGGTGATGATGGTGGTGAGGATGGTGTTGGTGGTGATGAGTGTGATGATGTGGTGATGGTGATGGTGGT
GGTGATGGTGGTGATGGGGGGGTTGGTGGTGATGAGTGTGATGATGATGATGTGATGATGGTGGTGATGG
TGATGGTGGTGGCGATGGTGGGGTTGGTGGTGATAAGTGTGATAATAATGACGGTGGTAATGATGGTGTT
GATGGTGGTGGTGAGGATGGTGGTGGTGATGATGGTGATGATCATGGTGATGGTGGTGATGTTGGCGATG
ATGGTGGTAATGATGGTGGCAATGGTGGTGGTGATGGTGGGGTTGGTGGTGATGAGTGTGATGATAATGG
TGGTGATGATGGTGATGGCAGAGATGGTTACAATGCTGAGAGTGATGATCTTGGCGGTGATGGTGGTGAT
GTTGGCGATGATGGTGGTAATGATGGTGGCAATGGTGGTGGTGATGGTGGGGTTGGTGGTGATGAGTGTG
ATGATAATGGTGGTGATGATGGTGATGGCAGAGATGGTTACAATGCTGAGAGTGATGATGGTGATGGTGA
CGATGGTGATATAAGTCCCCATGCGCACTTCCTCTTCTCTAGCTCTGTCTCTCACCTGCTCTTGCCTGAG
CTCCACTGTGGCCACCCACCTGTGACCTGTGGATGGAAAGTAATTCTAATTATGACATTTTCCTACAAAG
AACAAACCACTGGGCTTCTCTGGAGCACAAAGGCATGGCGAGATGAGCAGTTTGCCCCACAGGACGCTGG
CATTGCCCTCTGAACTTTTTCCCAGATGTGCTGAGGACAAGGAAGTCAGGAGTGTGGCTTGTTTTCCATC
TGCTCAACACTGCTCGTGCCTGGAGCCCCCCAGCTGTGCCTATCAGCCCCTAGGGGTTGGCTGTCAGGGG
AGCAGAGAGACTCTTGGGGCAGCGTGGCCTTGGTCACAGCAGAATGCTGGGTTCTGACATTTATGAGCCA
TGTGACCTTGGCATGCTCCTTGACCTCTCTAAACCTTGCATGACACTTAGGAAGGTTAATAAGATCACGT
CTGTGAGAGGTCTTAGTGCCACAGTAGATCAGTGTCAGTGAGGGTAGGGACTTAGCTCTGTGGCTTGGGA
GGCGCAGGTGGCAGTGAGTAGCCAGTGGGTGAGACCCAGAGAGGCTGTGCCTGTGAGCGGCTGGGCAGAG
TGGGAATGGGTGCTGTCAGCTGGGTGCACAGGCAGAGGAGGTACCGCTGCCCACAAAGGGAAGTCTCTGA
GTTGGAGCGGAGCAGGGGCGGGAGAGAAGGCAATTGGGGCCTTCCTGGGTTTGGGAGGCTCAGCACCAGG
AGCAGCCCACAGCCAGGGCTCAGGACCCAGGGGCTCACCCAGCCCTCCTGACCAGGCTAACCTGCGGGGT
CTGGAGGGAACACGGGCAGCCACGGCCATGCGCACTGGGAATAAGTGAGAGGCTCCCGCTATCTCAGACC
TGGCGTGGGAGCTGTGGGCCTTTCCAGGGCCCGGCTGCTGCGGAGGTAGGAGTTTGGTGTTGGCAGCAGG
AGCAGCAAGGACACACTTTAGGACCTACAGCGTGGAGGCAGGAGGACAGGGAAATGGCCTCGAATGAGTC
CGTGACCCCTTGAGGAATCTGCACACGACTCCTGGCTGTCTTGTCACTTGATGTAAGGCCTCAAGCGGCA
TCTCCTGAGGATTTCATGGAGGCCAGAGGGGACTCACCCAGAGGTGGAGGGATGCAAGCTCAGAGGCCAG
GGTGGGCGGGGGCTGGAGCTGCTCTGTGACAGCCCAGAGCTCCCGGAGCCGCAGCCACCGTCCCAAGAGA
GCTCAAAAGAGGAGGGGGTGGGAAGGGGGAGGTAAAAGCTGTTCAGCCAAGGCTTTCTCAGCCTGGGGAC
TGACCTGGGTTTGTCCTATTCTGTGAACCAACCCAAACATGTAAATGTCCTGGCACTGAGCAAAGCCTTC
CCCAGGGGCGTTTTCCCTGAAGGACTTCTCAGAGCCTTTAATGGGCCAGGGAATCTTGTCACGCTCAGGT
GATGGTAGAGGAGGAAAGGACTTCTCCAACCGTGGTGACTCTAGAACCTCTCCCTACAGCAGCTCGGGGA
GCTCCAGCTCTGGAGAACACACTTTGGGAAGCCTTCCCACGCAGGACAGAGGTCTCTCTGCCGGGCTGCG
AGCCCTGCCCACTTGTGACCAGGGTTTTCAATCCCCTGGTGTGAGAGCAGTCTCAGGTAGCCCAAGCCTA
AGTGGAAAAGGGGCCGGGAGAGGCGGCTGGGCACCCCCTCGCTGGGGCTGGTCTCCTGGGTCCCTGTTTC
CTGTCTCAGGAACTGGGAGGAACCCACTTCCACCACCCAGCAGGGGAAGACTGAAAGTATTAGGGGGCCT
GTCTGGGGTCAGTCCCACTGTGGACTTGGGCACTGCCACTCCACCCCCCCCTGCTGCCACAGGCAGTACC
CAAAGGTGGTGCATTCGGACCCTGAACCCCCAGCTTCATGGGTTCTAGGACCCTCCTCTCCATGGCTCAG
CTTCCAACTGATGACCCCTCTCCAGAGCCAGCCTCTGTCCTCCAGCAGGAGGTAGCTTTGGCCTCTCTTG
GTCTCTGACCCGCATGTCCCTTCTGCGCTGCAGTCTCCTGGGCTCAGGGTCCTCCTTCAGACTCCTCCAG
GGAGGCCACACCCTCACACAGACCTGCCCTGGGCTCCCTTCTCTGCTCTGAGCAGCCCCTAGTCTTACAG
GAGCTCTGCAGAGGCCCTTCCGCTGCAGAAGAGCTTAGGTGACAAGCCAGAAGCCTCAGGTGGCCTCCTT
GTTTTGCCAGCCCTCCCCCGTCGGTTCCTTGCTTTTTCTACCCAGCTTGGATCTCGGGGGGCTGGCCTGG
ATGGATTTTGTCAATGACTCACTTGCCCTTTAATGATCATTGCATTTGGGAAGCCCTGGCCAGAGATGCA
AGTGTAGCAGGAGAGGTTGGAATGTTCCTGTGCCTCCTCCCGGAGCTGCTGCTGTGGGGCAGGGAGACTT
CTCCCTTCTGGTGGCCTCCTCTCCTCCAGCCCCTCCTTCTCACGAGGCTCTGTGAGACTGTTTTGGGCCT
GGAGGCGGCAACAGCTTTCCACGGGGCTGGGTGCCGGGTGCCTCAGTGTCCCCCACTGTCCCTCCATTCT
GCCCACTCCTCTGCAAACAGCCTCTGCATCACGTGTTCTTCAAGATGCCAGCCGAGCGCGCCTGCAGGAG
CCTGTCCTGCTCAGGGGCGGAGGGCTCTGCTCGTGTGGGCACAGCTCTGAGGCGGTCCTTGTAGCAAACA
TCGCTGACTGCCTACCACACGCCCGGGGACCTCCTGGGCACCTGTCAGTCATGAACGTAACAGGTTCAGG
TTACCCAAGTCCCATGCCCTAACTGGGCAGTTGCACCATGGGCAGCAACAGACCCTGGGCTTCAGGATGT
CCCAGCAGAGCCGCAGCAGCCACAGAGCAACCCCTCTTCACCCTGGGGATGGGGCTGGGCCTCTGAGAGC
AAGCATGAGATTGCAGAGCCAAAACCCAAGCTGTCAAAACGACCAGCAAGAAAGACAGTTTGGATTAATT
GGCACAGGGAGGTCCCTAGACATTTAGATTATGGCTGCTCCTGGGCTGGAGCGTGGAACCCAGAGACATT
TCACAAATTAACATAAATCCTGTGAACCCTCTGTCCATTTCAACGCTTAATGCCAAACATAAACAAATGA
AAGTCATTTCAGAAGCTGGAGGAGTTTGAATAATTCAGTCCCATCATCATTTACTCCAAAACGCCTCATT
TCATCTTATGAGTCATCGTTGAAAGGAAAAGAAGATTTTACTTGGTATTAGAACCGGGAGAGCTGGAAAA
GCTTCGAAGAGGAAGGAGGCTGCCAGCTTCCTGGGTGCACAAGGCCGTGGCCAGCTTCCGGGCTCAGTCG
TGGACAAAGGCCTCCTGGGACAGAGAAGTGGCCTCTAAGCAAAGGCGGTGGTGTGACGCTAGCAGGCCTG
TGTCCACCTCCTGGTCAGGCTGCTGACTGGCGGGGCTCTGGGGGTAAGGCCTTGGTCCTGCCGTGCCTCC
TCCTGGCTCATCTGTGACACAGAAATGACAGTTCCTACTCCCCAGCTTGTGCGGGCCCAAATGGGATGGG
GTGTGTGTGTGAGGACTGGGGCCTAGGCCTGTGCAGGGCAGGTTGTGTTACTAACGTCCCCCCGTGGCTC
CTGGGCTAACGGTGCACTTCTCCGTCCTGCTTCACTGCCTTATGGCACGTGTCCATTTCCCCAACCACCG
GTGGGCCCCGGGTGGCTTGGCCGGCCTGGTGTCCCGTGCCCAGCATGGGCTCTGGCCCAAGTTAGCACTT
GCTGCCTAAGTGCCTCTGCCTTTTACTCACCTCCATCTGGAGCGGGCTCAGTGGGGTTCCTGCTGGGGCT
CTACGGGGGCATCCAGACTTTGCCCTCTGACCAGCCCCACTGTCCTGTCCTTCCCTCCCCTGCGTCCTCA
TCTGTCACTCCTTGGTCACAGCCGCCCCCTGACTTTCCTCCCTGCCTCCTTGGCATGGTGGGAAACATGC
GAGTTCCATTTCTGAGGCTGCCTTGTGCCTGATCTTGGGCAAGTTGCTTGCTAGACCTCTCGGCGTCTCC
GTTCTCAGCGGTGCGGGTAACCTGGCCCTGTGCTACTGTGTGTGGGTTTACAGCCAAGGCCTGTGAGGCA
CGTGACCACCAAAACCCTCACGAGGCCATGTGGTCGTGGCTACGGGTTTAATCTAAAATTCATTCTGATC
CCTTGGCCTTGGAAAAGGCACTTAGCAGGGTGGTGAGGGCCACAGGTGTGGTCTGAGCTCCTGGGGAGCT
ACCGAGGGCAACAGGCATGTTCTGGAAGACCCACCGTCTGAGGGGTCATGTGACAGGTGGGCTAGGTGGG
CACAGAATGGGAAGAGAGGCAGTGAGGCAGCCTCTCTGCAGAGGAGGGGCTTCACAGAGGAGGCAGCGGC
TCAGGTGGTCCCAGGAGGATGGGTGGGGTTCGGAGGCAGAGGGCTGGACTTGGAAGGAAGGAAGAGCGGA
CACAGGGCCTCTGAGCGGACAGTGCTGGCGGAGCCCTGGGGAGCACCGAGTCCCCGCCGTGATGGGTCCC
TGAAGCACCGGAGCCAGCAGCAGGAGCATGCGGGGGAGACCTTGGCCCAGCCCTGCAGTCAGGCAGTAGG
TGAGCCCTGAAGGGTGAGGTTGCTTCAGCTGGATGAGAGGGTGTGGGAGAGAGGAGCATCCCAGGCAAAG
TGAGCCGCGTTTACCTGGAGACCAAGGGTGGGAAGCGAGGGAGAAGAGGTCGCGGTGAGCCTCGGGTGGA
CCCATGTGGCAGACCTGTGAGTTGGTCCCCGACAGCCTCCTGCCTTTCTCCCTGACTGCCCAGCAGCAGT
GTTCTTGGGCCTCAGGGACGTGTCGTGACTGGCTGAAGGCTGTCACGGTGGTCCTGTGTAGGACTGGTTG
CCACAGGTAAGTAGTGACCTGGCCTGGCCGATGCTGTGTTAGGATAAACGTGCTAAGGAGGCTCTGGAAA
AGAATTTTCCTGCTTGGACAAGACAGAGACTCACACGAGGAAATTCCTTTTGTTCCTACCCTCACTTCCA
GTGTTGAACACAGTCATGCTAGAAATGGTGCCTGGTGCAGCTGCAGCCGTCTTGCTACCAGCAGGGCAAG
GCAGAGCCGGCCGCCCAGGGACCTGCCACTGTGGGGTGGCCGAAGCAGCCCTGGCACCACACAGCTGTTA
TATGCTGTGGTCAGAAGTCCTTATTAGGTGAGCAATTAATCAGATGTGTGGCTTCTCACCCTGTATTTCC
TCTGGCAAGACCCTGCGGCACTGCAGACCCCTGTCCTCATATGAGGCCTAAGCAGTGAGGAGCTTCAGAC
CCGTGTGAAGACAGAAGGCGCGGGGAGCAAAGGTGGCCAGAGAGGGGTGGGGTGGGCCACGAGCCCCCAC
CAACTGCAGGCCCACGGCTCAGCAGCAATCTGAGGTCTCCCAGGCAGCCTTCTTGCCTTCCTTCCATGGC
TCCTTGGAAAGAGCTGGGTTTCATCTCGGGACACAGTGGCATTAGGGATCGGCAGAGACCAGCAGGAGCC
CTGGGTCCAGACTGTGGCTGTTTCTGTGGTGACCAGCAGCCGGCACTGCCTGGCAGTGCCTGGGAGTGGA
CGTTGAGGACACTGTGCCCAGGAGGTCAGTCTGCCCACCCAGGCTGTGTCCTGGTTGCTGGGTGGGGGTG
TGAAGAGTCCAGGACCAGCCGTTGTCCCACCCAGCAAAACCCTCTGTGTGTGGATCCCATGGGGGGCCGG
GCTCCGGGGATGGACAGCCAGCAGCCCTGGCCTGAGCAGCCATCCGGAGGAGGGAGCAGACAAGAAACAG
GCAGTGACCGCACAGGGCGATGGGGCTGGGCAGGGAGGAGGCGGGTTCGCTGTGGCCAGATGCCAAGCCA
GAGCCGGGAGGCCAGAGGGAGGGCCGCAGCCGGGACAGGAGTGACTGATGCCAGGGCCTCAGAGTGAAGA
CAGGGCTGGGGTCCCCTGCCCCCTGATGGGAAGGAGACTGCGTGGCTGGGGTCCCTGGGAGCGCATCCCT
TTTGAGACCACACTCCTCAGCAGCACCTCCCTCTCTCAAGCACCAACACTGGCCTTTTGGCTGCCTGAGA
AGGGGCTCTGGGGTCCAGGGGAGCCAGCTCAGCTCACCCCAGTGAGCTTCCCACACTCAGACAAGGCCCT
ACTCCAGGGCAGCTTGGCCCGTGCCTCTGCCCCTACCCCTGCCATGGCGTCTCTCCAGGCCCTAGGTCTG
TACTCACATAACCCAGTCCTGCATTGTGCTGACTCAGCCTCTGAGCCTCAACAATCCCTCCTTCGAGTGG
GGACAACATCCCTGCCTCCGAGGGCTGGTGTGCGGATCGAGGGAAGTCACAGGTAGTCACAGCTCTGTGA
AGGGTAACGCGAGCGCCTAGGCTGGGAGGCTGGGTCTGCAGCTGCCGGCTCCACGGGCTGTCTCCACCTC
TCCCTGCCTGGCTCTCCTGGCTCTTCGTTTCGTCATGTTCCTTCTGCCCAACCAGTCCTAGGGGGACAGG
GAGACTCCTGGGCACAGGGGCTGCTCAAACTGCCCTGGGACAGATGGCCTCCTGCCCTGCCCCAGGCAGC
ACTGGGAAGCAGAAGGGCTGGGGGAACTCCAGCAAGGCCTGGGGGGCATTGAGCAAAGCCTGGAGAGAGC
ACACTTGTGGATGGGTGCACCTGTGGGTGGCCATACCTGCGGGGCGGGCACACCTGCAGGCTAGGAGTAG
GGGGGCTGGGCGGTGGGCCCAGGGGAGGGTGTTACTGAGTTACGTGGCCCCCAGTGCTCCTGGTCCTTTC
AACCTTTAAGTTGAAGATAAAGTCACTTTTGCAATACTAAAGACCAACAGATTCTAATATTCACTCCCAT
GCAGGAACTAAGTGCCTGTTACCTGCTGTCCTGCTTGTCCCATCTTAGGGTTTCCCAGGGCCCAGCAGAG
CCTTTGCCATACCTTCTCTAAGGCCCAGGCTCTGGGAGGAAGGTCACTCAGACTTTCAGCACTGCTGCTG
GTGGATGGGGCCCCTCTCAGAGGCCCTGGATCCTGCTGGGCCTGTCTGCCTGTCTGACCATGGAAACCTC
CAATGGGGCAGGGTCCAGGTTTCCCTCCCTACAAGCACGCTCCTAAGCACGTCCGCTCTGTCGTTGTAGG
TGTAGAACTCAACAATCACACCCTGCAAAGGCGGAGGAAACCCTCTTCCCTCCCCAGGCCCATTCTGTGT
CTCAGGCCCTGCCTCTCCCCTGTATGTACCGCATACATCCCTTTCGGGGCTATGCACAGGCTTCAGGGGA
GCCCCACCCATGGGGTGCATCTTCAGCAGGACAATCATCAGAGAATGTTGTGGTCCAGGATAGGGCAGTC
CTCCACTTCTGGTCCTCCAGAAGTGGACTAACTAACATCTCCTCCAAAGTCATTCTTCTTCCATGTTTAC
GGTGACCTCTGTGTTCTAATCCTGGGAGAAGCCCTAAGCTGAGCTCACGGGAGCTGGGAGACCCTGCTGC
CAAGCTGAGTCTCACCATCTTTGGCCCATTTTTTTTTTTTTTTTAGACAGGGTCTCGTGCTGTTGCCCAG
CCTGGAGTGCAGTGGTGCGCTCTTGGCTCACTGCAGCCTCACCTTCTCTGGCTCAAGCAATCCTCCAGCT
TCAGCTTTCCAAGTAGCTGAGGATACAGACGTGCATCACTATGCCTGGCTAATTTTTTGTATTTTTTTTT
GTAGAGATGGGGTTTTGCATGTTGGCCAGGCTGGTCTTGAACTCCTGAGTGTAAGAGTTGAAGAAAGAAG
AAAGAAACACGAAAAGTGGCTCAACAGTCCAAGACAGGTTTATTTTGGAGAATAAACCTGAGAGGGGCTT
CTGGCCGATTGCTGTCAGGAGCACTCTCTCTTACAGACTAAGGGTATTTAAGGGTTTAGGGAGGGAGAGC
TTATCGCAGGTTGGGAATGTTTCTGGTCAGAGGAGTGTTTGATTTCGGGGTAGGAATGTTTCTGGTTGGA
GGGCGCTTTATCTCAGGGTTGGAATGTTTCTGATTGGAGGTGTCATTTGTGGTTTATGGTCATGCTGACA
GCCATTAGGCTGATTTTTTGGGGGCTGGATTTAGGCGGTTTTTAATCAAGGGGAACTTAAAATGCTGCTG
TTTGTCCAAAATGTTGATGCTCCTGCTTTGTCAATCCAGACCCTATAGTTATAAAAGGATGAGGGGCGAC
GTGCTCTTTCTGGCTACTTCCTGCTGAGAGAGGGTTGTCGTTATGGGACACTGAACATGGTGCTGGAGTG
GAAGAGGTCGATTTGTTCTGGGTAGCACACTCTGCCTCAGAGGCCCAGAGGCAGCGCCCACTGAAACATC
TAATTTTCAGCTCACAGGGCTTCAAGAAAGCACAGCTTAGGTTTTAGTGATCTCCAGCTAGAAAAAAAAA
AGGGGGGGGGGAAGGAAAAGAAAAAGGAAAAATTGAAAACATTATTTTGGAGACTTGTAGCCAGAAAAAT
TAGAATTTAATCCAAACTGTAGAAAACAATAAAAATTGAAAAACCTCAGACAAGACTAGAATTTAACAAC
AGGTGTGCTACAGTTTTTGAAACACAATTCTCTCTCTCCAGTTTTCCATTTATATTAAAAGACAAATCAT
GGGGCCAGGTGTGGTGGCTCACACCTGTAATCCCAGCACTTTGGGAGGCCGAGGTGGGCGGATCACAAGG
TCAGGAGATCAAGACCATCCTGGCTAACACAGTGAAACCCCGTCTCTACTAAAAATACAAAAATTAGCTG
GGTGTGGTGGCGGGCGCCTGAAGTCCCAGCTACTCGGGAGGCTGAGGCGGGAGAATGGCGTGAACCCAGA
AGGTGGAGCTTGCAGTGAACTGAGATCGTGCCACTGCACTCCAGTCTGGGTGACAGAGTGAGACTCAGTC
TCAAAAAAAAAAAAAAAAAAAAAAAAAAAAAACAAATCATGGTATGACTAGTTTGCTTTGCCAGATTTTT
TTTTAGGTAAAGTTTCACTCTTGTTGCCCAGGCTGGAGTGCAATGGTGCAATCTCAGCTCACTGCAACCT
CCACCTCCTGAGTTCAAGCGATTCTCCAGCCTTACTTCCTGAGTAGCTGGGATTACAGGCATGTGCCACC
ATGCCCAGCTAATTTTTGTATTTTTAGTGGAGATGGGGTCTCACCATGTTGGCCAGGCTGATCTCCAACT
CCTGACCTCAGGTGATCCACCCATGTCAGCCTCCCAAAGTGCTGGGATTACAGAAGTGAACCACCGCACC
CAGCTGTGGCCAGATTATTTGTATAAGGTGCAGCAAGAATAATTATTTTTACATAGGCCTTTTAAGTTGG
CTTCAAAAAAACTCTGTTTCATGGAAGGAATTTGAGATAAGACCTTTTTAAAGCCAATCCCAGCCATGGA
AGTGCACCATCAAATACCTGTGAGTTGGGTGAATTCTTCCACTCTTGAGGCTCCAAGATAACCTGGGGTT
CCTGGCCTGTGAGAAAGTGACATTCCTTTACTTACCTCAGGTCAGAAACCTGCACAGGGACTGCGCGCAC
AAAATATGAGGCCCACAGGGACCGCGCGCGCAAAATATGAGGCCCACAGGGACCGCGCGCGCAAAATATG
AGGCCCACAGGCACCGCGCACACAAAATATGAGGCCCACAGGGACTGCGCGCACAAATTATGAGTCCCAC
AGGGACCGCGCGCGCAAAATATGAGGCCCACAGGGACCGCGCGCGCAAAATATGAGGCCCACAGGGACCG
CGCGCGCAAAATATGAGGCCCACAGGCACCGCGCACACAAAATATGAGGCCCACAGGGACTGCGCGCACA
AATTATGAGTCCCACGGGGACCGCGCACACAAAATATGAGGCCCGCCATCTAAGGGCTCTACTGGCTTCA
CAAGTCAAGTTTGATTCCTTAAAGGAGAGCACACCATTCCAGTCAAAGCCTTGCTAAAACAACCAGTTCT
TCCAATTGTGTCCTGCCATAAAAGAAAACAGACTTTTGGTCGGGTGCCATGGCTCACACCTGTAATCCCA
GCACTTTGGGAGCCCGAGGCGGGCAGATCACCTGATGTCAGGAGTTCAAGACCAGCCTAGCCAATGTGGC
GAAACCCTGTCTGTACTAAAAAACACAAAAGTTAGCTGGGCATGGTGGTGCATGCCTGTAATCCCAGCTA
CTCGGGAGGCTGAGGCAGGGAGAATTGCTTGAACCTGGGAGGTGGAGGTTGCAGTGAGCCGAGATTGCAC
CACTGCTCTCCAGCCTGGGGAACAGAGCAAGATTCCATCTCAAAAAAAAAAAAAAGAAAGAAAGAAAGAA
AGAAAACAGACTTGTATTGCACCTTTGCAAATAACCATACTGCCATAATTTAAGGATACTCACAGGTAGT
TTCCAGACTCGGGAGAAAACCAGGCAGAGAGAAATAAGCATGCCTCAAATTTTGTTCATGGGAGCACACC
AAACTGTCAAAAGCTGTTGATAGCTCAAAAGAAAAGCCTCTTTGACTCTGAAAAGCAAACAAAGGACCAA
CAATATTCCGAGCAAAACATCAAAAAGATCACTCCAGTCTGTTAGTTCAGTTCACGCAGTCAGTTCCTGT
CCTGCCTGATATCAATGAACATTCCAGCTCTTCAAGAGTCCTGAACGTCCTTCCTCTATTCTGATGTCAC
AATCTGCAAAGTTATCAGAAACCTGCATTCAAGAGCACCTGTCAGAACTTTATAGCTGATCATAAAACCA
CCTTCTAAAGAGGACCAAAACAAGACAACAATTGTTCATGGATGACAAAAAGTTTTAGGGTGGCCGCAGT
TAAAGACACAATTGATGAGGAAATCTGTTACCTACGTGGCACACAACAATTTTAACATAACAATTATAAT
TATTACTGATAATGTACACTAAAACATATCAGGATTGTAGGAGTCTCCCACAACCTTGGAACACATACCA
AAAACATATCTACACAAATATAGCCCAAAGAAAGCCAAGCACCATTTCGTATTTGACAATATTTTCTGTA
TAATTTTTATACCAAATAAGCCAAATTTCACCTTTACATTAGTGTACTATGAATGTTAAACCGAATTAAT
AAATCCTTATAGACATATTTACTCAATTTTAATATTTGACCACAAGGTAAGATTTTTATAGACTTTTTAT
AGCCCTTTACAATTTTTGTTAAAGAGCAGGTTAGTGCTCTAAGAGAAACCCACTGTGCTTTTATTTTAAT
AAAATTTAATTTACAGAAAAACTGGAGGATACCCCTTTTAGCCAATATGTTTACACACAGAACTGCCTCT
AAAATCAGCCTTTCACAACTAGCCCAAACCTTCATTTTTATTTTATCCAACTGAAAAAAAAATCCTTTAA
CCTTTCAAACTTGGCAAAAATCCACATTCTCATGCCTCCCTGCAATCTTTCTACCAAAACTATATTTTAC
TTTTCCTACATACCTTGCATGTAAGGACAGTGGCTTGGAATGTTGGAACCTTTCCTTGGAATGTTCTGGG
TTTCAGCACCAAATGTAAGACTTGAAGAAGGAAGAAAGAAACATGAAAAGCGGCTCAACAGTCAAAGACA
GATTTATTTTGGAGAATAAACCTGAGAGGAGCTTCTGGCCGATTTCTCTCAGGGGCACTCTCTCTTATAG
ACTAAGGGTATTTACGGGTTTAGGGAGGGAGAGCTTATCACAGGTTCAGAATGTTTCTGGTTGGAGGAGA
GTTTTATTTTGGGGTGAGAAGGTTTCTGGTCGGCAGGGAAGTTATCTCAGGTTGGCATGTTTCTGGTTGG
AGACAGGTTTATCTCAGGGTTGGAATGTGTCTGGTTGGAGGTGTCATTTGTAGTTTATGATCATGCTGAC
ATTAGCCATTAGGCTGCTGTTTTTGGGGTGGATTTAGGTGGTTTTTAATCAAGAGGAACTTAAAATGGCA
GTGTTTGTCCAAGATGGTGATGCTCCTGCTCTGTGACTGAGCTCAAGCGATTTGCCTGCCTCGGCCTCCC
AAAGTGCTGGGATTACAGGCGAGAGGCACTGTTCCCAGCCGTTGGCCCGTTTTCTAAAGCCACGTCTTCC
TCTGCGATCATCCAGAACAACACAGATTCTCCACCTCCTCTTTTTCTAAGCTCTTGCTGCAAATGCTGGA
GAAAGAACAGTGAGCGTTCAGGCTGCAGCTTGGCCAAAAGGCCAGCGAGGGAGAAGTAATTACCTCGGCA
ATGACAGGTGTTCCATCCTTTCTTCTCCCCTGGAAATATCAGCCATCCATCAGCCAGGGCCAAACACCCA
CCCACATCTGGCTCGGAAAGCAGTAATGTACCAGGAAGCAGCTGTTTTCGAGAGAAGCCAGCCCTCTGTC
AGTTTACTAGCTTATTCTCTCACTCATTCAACATTCCTGTGTTTATCATACCATCCCAGGGGTGGTGTGG
CTTAAGGATGGGTCTCGGGCTGGCCTGGCTGCTCCTGTTTCCCGACTGCCACCCACTAGCTGTGTGACCT
CAAGCAAGCTGCTTAACCTCCCATGCCTTGGTTTCCTCAACCATTAAGTGGGAGGTAACAATAGTGGCAC
CTACGCATAGATTGTTCTTGGGGGGTAAATGAATTAATACATGTGAGGGTTGGCCAGGCACAGTGGCTCA
CGCCTGTAATCCCAGCACTTTGGGAAGCTGAGGCGGACAGATCACAAGGTCAGGAGTTCGAGCCCAGCCT
GGCCAATAAGGTGAAACCCCATCTCTCTACTAAAAATACAAAACTTAGCCAGGCGTGGTGGTGCAAGCCT
GTAATTGCAGCTACTCGGGAGGCTGAGGCAGAAGAATAACTTGAACCCGGGAGGCGGAGGTTGCAGTGAG
CAGAGATTGTGCCATCGCACTCCAGCCTGGGTGACAGAGTGAGACTCTGTCTCACAAAAATAAATACATA
CATACATACATACATACATGTGACGGTCTCCCAGACATGCACTCCGGCTCCACCTTGACCAAGGGGATGG
GGCTCACGGTTAAGTCAAACTCTCAGGCTCTTTCTCCAGAGAATTTGAACTCTGAGCCTTGGGCTGATGA
CACAAAGACTCAAATGGTGGCTGCGCCTTTCTCCCCCAAGTGCACCCCCAGAGACTGCTGGTGCTTCCTG
CTAGCTGGATCCCCAGAGCTGCTTGGTCCCTGTTCTAGGTGAGGCCATTCAGCAGTCCTTGTGATTTTCT
GAGCATACTTTAGCCTTCTAGCACACTCCTCTCTTCCCCTAAAATTAGCCAAGAGTGGGTTTCTGTTGCT
TGCATCCCAACTACCATCATTGGGACAGAGCCCCTGTGCTTGAGACAAGCAGAAGATAGACTTCTTTCAC
CTGGGGCCTGGCTTCGTCCAACAGCAGAGCCCAACCTCCAGGGCAGACTGACCCGTGATGGGCATGGGAG
CCCAGAAAAAGGCCCCATCCAGCCTGTGGGATCAGAGGAGCCTTCTTGGAGGAGGTGATGCTGGGCGAGT
GTTAAAGGATACCTAGGCATCAGCTAGGTGAAGAGAGCAGGGAAGGAGACTCCAGGGAGAGGAATGTGTG
AGAAAATGGGGAGGAGAGGGAGGAACGGTTGGTGGGCAGCTGCCACTCTGTCCACTGGCAGAGAAGCAGC
CAAGTCTCTGATGGAGCCCACCGGAGCAGCCTACCTGGCTTCTGTGGTCACTGGCTGTGACCCCGCCAGC
CCTGCTCAGCGCTGTGCCCAGCCCTGGGTGCAGGGAGGTGCGGTTTGCTCTCAGAGGAGCAGCTAGCTGG
GAGCATCCGAGGCCATTAGGGACAGGACGCTAATGCATCGGCGCCCCATTGATTCTGCCTGGCTTTTGTG
AACACGTCTGCGCTGACTAATTTGTTTAATTACTCATTGCCGCATCTGTTCTCAATTGCCCTATGCAGAT
ACTTAGTCTGTGGCTGGGAGCCAAGCCTCAGGGTCCCTTTTCCTCTTCCAAGATGGGTGGCACTGAACGC
CGAGGCCACGGCCCGTCCTGATGTGGTCAGAGATGTCGTCATGTGCCACTAACAGGCGTCGCCAAGACCA
GCCAGGTGCAGACCTTGGGTGGGTCCTATGGGGTCCTACAGGAAGCATAGGCATGGTCCCTGGTGGTCCC
CAGGAGCACGGCTCTAACACAGCCGAGGCATAGTGTGAGCAAAGTCAGACGCAGTGGTTACAAGCAACCC
CACGTGGTCTGCTTCGAATCCAGCAAACTTTTGTTTTCAGTGCCCAGCTCCCTAAGCCTTCTTTGTCCTT
ACCGTCTCTTCAGAATCTGTCTGCTTCACCCTGAATCTTGTCTATTGTCCTGGCTAGTTCAGCTGGAGGC
CAGGGGTCGGAGACTTAGAGAAATGAGGAGGGGGCGTGGAGCAGGGGCTGAGGCCTGAGCGGTGAGTGGG
GCTCGGTATTGACGATCAGCGAACAGTCTCCTGGGGAGTCAGCTTGAATGGGGCCTGTGATATCTGCGGC
CAGTGCCCTCGGTATGTCCCACTCAGCATCCTCCCCAGGTCAGAACACATTTTGGGGCAGAACCGAGTTT
TCTCTTCACTTTCAGACTCAAGTCCAGCTTATTGGGGCTTATGAAGACTTCCACCTCATACAGGATGAAT
GATTCTCTTCTCCATTCCCTCTGCTGCTCGTGGACACTCGGAGGTGGGGGAAGGCTCTGTTCTTTTACTT
TTCTGGTTCTAGTTTCTCAGGGAATGAGGCAGGAGGAGAGACATGGAAAGGGAGAGAGATACCTTCCGTT
TCAAGGAATATGCAGTTTGGATGTCTGAAAAAGATTTATGGCAGAGATGCTGGATGGAAAACAAACACAC
AGTTTGAGAGGGTCCTTTTTATTTTTATTTTATTTTATTTATTTATTTTTTTGAGATGGAGTCTTGCTGT
GTCACCCAGGCTGGAGTGCAATGGTGCAATCTCCGCTCACTGCAACCTCTGCCTCCTGGTTTCAAGTGAT
TCTCCTGCCTCAGCCTCTGGAGTAGCTGGGACTACAGGCACCTGCCACCACCCCTGGATAATTTTTGTAT
TTTTAGTGGAGACGAGGTTTTCACCACGTTGACCAGGCTGGTCTCGAACTCCTGACCTCATATGATCCTC
CCGCCTTGGCTTCCCAAAGTTCTGGGATTACAGGCATGAGCCACTGCGCCTGGCCAAGAGGGTGTCTGGG
AGGCCGAAGCGGGAGGATCATGAGGTCAGGAGATCGAGACCATCCTGGCTAACATGGTGAAACCCTGTCT
GTACTAAAAATACAAAAAATTAGCCAGGCATGGTGGTGGGCACCTGTAGTTCCAGCTACTCAGGAGGCTG
AGGCAGGAGAATGGCGTGAATCTGGGAGGCGGAGCTTGCAGTGAGCTGAGATCGCACCACTGTACTCCAG
CCTGGGCAACAGAGCAAGACTCCGTCTCAAAAAAAAAAAAAAAAAGTTAAACACATGTCTAACCTATGAC
CCAGAAATTTCAGTTCTGGGTATTTATGCACAAGAAATGAAAAGGTATCTATCTGCATAAAAAGACTTGA
ATAAGATTTTTCATAATAGTTGTATTCACCATAACTAAAAATATAAGCCACCTAAACATCTATTATGTGA
AAGAGTACCCATGGAATGTATAGCTTGGATACTACTCAGCAATAAGAGAAGTATGAACAAGAGGTAGAAT
GCAGTTCAGAGACAAACACATGAAAAACACAAAAGAGAGGCAAAAAAAGGTGGCAGTGGAAGGAGGAATT
CTGACACATGCTTAACCGGAGTTCCAGAAGAAGATAAGACAGTGAAGGGGACATGTGATAGTCAAAGGCA
GGCCCCAATCCTCAGATCAGGAACCATAACAATTCTCAGAGAGAATAAATGAACAGAAATCCATATTTAG
ATCCATCAGAGTGAAACTGCAGAACACCAAAGACCACAAGAAGATTTTAAAAGCAGCAAGTACAAGAGAG
ATTACCCTCAGAACACCAACAACAGATTGACAGTTGACTTCACAACAGCAATAATGGAAGACACAGAGCT
GGATACACAAAGGAAATTGACTACAATCTAGAATCCAAAAGATTCTTGAAGGATGAGGGCAAAATAAAGC
CATTTTCGGATACACAAAAGCTGAGAGCAGCTATTGCAAAGAGACTCTCACTAAAGGGCCTCCACACCAA
TGCACTTCAGGAAGAAGGAAAGAGGTTTCGGACGGAAGGTCTGTGTGCAGAGGGAATGGCTGTCTCAGAG
GCGACTCAAACTCAGTATGTCCAGAAAGGACTCACAATCTGCTCTCCCAGCCCAGCGCCTCCTGGGACTT
TGGCCTCTGTGGATGATGACCACAGTCACTTGGGCCAGAAACATAGACATCATCTTGATACCCCTTCTCC
CTCACCTCCCCCATATCCAGTCACCTCCAGTCCTGTCATCTTTGCCTCCTAATCTCTTTCATCTCTGCCC
TTTTCTCTCCATCTCCATGGCCACCCAGCTGCCACTGCATTTTGCTCACCACCTGCAATTGGCCTTCCAG
CCCCTGAACCCCTCTGATCTGCTCAGCCCGCTCTCCACACCGAACCCGAGGCTCTCTCTTTGAATGGCAA
TCTGATAGTCTCCCCCCTGTTTAAAACATGAAATGGTATCCTACTACCCTGGGGATAAAAACAAGACAAA
AACGTTTAAGAGGTTAGAGAGGTCTTCATGATTCAGTCCCCACCCACCTCTCAGACTCACCTCCCGCCCC
AGCCTCTCTGGACTCTTTTGGCCCCTCATGGGTGCCATCATTTTGCCCACATAGGCTCTTGTCTGTGCTG
TTTTCACTATAGAGTGGGTCCTTCCCTTCTTTCTTTGTCTAATTCATGACACTCATCGTTTAGTGCATTT
GGCACTTCCTCCAGGAAGCCTGCCTTGACCTCCCTGACTATATCAGCTCTCCCCCATTAAATGTTCCCCT
CGTGCCATGGTCCCCTCATCTGTGACATTGATCACATGAGCAATTTCACATTTATTCATGTAGTTAGTTA
TAGTCTGGATCCTCCTTTGGATTTTAAGTTCCTATAGGTAAAAGCCTTCCTCTCCTTTGGCCACCGAGAT
ATCTCCAGGACTACCATGGACATGCAGTAAACATTCACCAGTTGTTGAATTTATGAGTGGGTGAGTGGTG
CCTGCCACCCTAGAATTTCCCTTATTTGAAATTCTAGAATAAGCAGATTCACTTCTTTTTCACATCCATG
TGAATTTTTGTTCTTGTATAAATGAATAGTAAGTAAGAGCCATAAGAAATAATTGGAGAAAGAAGGAATT
GGGAATTGGGAAGAGAAAAGAGAGAAAAACAATAGAGGCAGAGCAGGGGCTTTTTGCAGTGATGCTTGGG
GAGAAGAAGGAAGCCGAAGGGACAGCAAGTGGGTAGATGGCAGGTGACTGGCCCCAGGTTATCCAGAGCA
GAGCTGAGACCACCCAGTCCTAAGGGGAAGGGGCTGGGAAGGAAGCCACTCAGCTCTGCCAAGCAGATTA
AATACAGATCAACAAGAGCCTTTCCCATTTTGAAAATGTACATTGCTCTGTGTTGCTGGGACTGCAGTGA
GACCCAGGAGGCAGGAATAAACAATTCTGAGTCATAAAATCATTAAGGCATCAAACATTTGGATCGATGA
GCAGACACAAAAGAATATGCTTCCTATACACATGTTAAAAGCCTAACTCTTGACAAGGATCTCACCGAAT
CTCTTGGGCAGAAGGATTCTGTAATGGAAAGTAATTGCACGCCACTCATCTTTGTTAATTTAAGATGAGT
AAAGGGTTATTGATTCACTCTTTGTTTCATGAGCTGTTTTCATATTGAATTTCAGTGAACAAAAATATTT
TTAATAAGGATTTCATGGGCTTATTTGGCATCTTTCTCTCCCAAGCTGCAGAGCTATAGATCCAACTGCC
AGCTGGACAAACCCAACTCATCTCCAGCCATGGCCCCTCCTGATGTGAGCCTATCTCAGGTTCTGGTACC
ACAATCCACCCAGTGCCAAGCCAGACACTCACGTATCACCCTGGATGCCCTCCGCAGCCCCTCACCCATC
CAACAGATGCCCCGTCCCTGTGCCTGCTAACTCCCTCCCACCTCTCCAGCTCAAGGCCTCCCTCCCACGT
GCTGGATCCTGCCTGTTCAGACCTGTCCTGTCTCCTGGTGGCCAAACTGGCCTCCCCAGTCAGTCCCTGC
TGCAGAAAGTGGTTTCTTTCTTTCTTTCTTTCTTTCTTTCTTTTTTTTTTTTTTTTGAGATGAAGTCTTA
TTCCATCGACCAGGGCCTGGAGTGCAATGGTGCAATCTTGGCTCACTGCAACCTCTGCCTCCTGGGTTCA
AGCAATTCTTTTGCCTCATTCCCCTGAGTAGCTGGGATTATAGACATGCACCACCACGCATGGCTAATTT
TTGTATTTTTAGTAGGGGTGGGGTTTCACCATGTTGGCCAGGCTGGTCTTGAACTCCTGACCTCAAGTGA
TCCACTGATCTTGGCCTCCCAAAGTGCTGGGATTACCCCTGTGAGCCACCGCACCCAGCCTGGAAAGTAG
TTTCTATAGTACAAAGCCGGGGGTGCTGCTCCCCTGCCCCACACACCTCAGCACCTCCATGTTGCTTCCT
GTGGAGTAGACACTATTGTTTTGTCTGCCCAGTCTCTTCTTTTCTTGTGGGAATATGCTTCTGGAATATT
TGTCTGGAAAACCCTCTCCTTTTGATAACTGTCTTTGCCTCCCTGGGACTGCAGCTGACGTGCTTGCATG
TGTGTGTGTGTGTGCGCGCGCGTGTGTGTGCGTGCATGCGTGTGTGTGTGTGTGTGTGTGTTGGGATCGG
CTTCCAAATCTTCCTACTGGGGGAATGCCCATTATCCATTAGATGCCACTCAGTGGGAAGTGGTGCCCCA
CCCGTCCGTGGAGACCTAAGGGGCTTAATAGATCCTCCCTGCATAGCCAGAGACGGATACAATCTGGGCT
CAGTGAATCGGTGCTTTGACTGCTCACAGCGTAGCTGAGAGCTTACTCCCAGAATGGCGAAGGTGGCAAA
GAGTCCCCATAGCTGGTGTTGTTGGCTGCCATCACCCCTTTTATCCAGGGGCACAGCTGAAATCTGTGCC
ACTCGGCTCTGCTGGGCAGGTGGGATAAATCTGCCCCAGCCTCTGTGCTGTCCCCATCCCTGCTCCTGCT
GCCCAGCAGCCTGGAGTCCTTCTCCAGACTTCCTGTAACTCTCTCCCCAAGCCAATGCCCTCCCTCGGGT
GAACAAGGGCCCCTCCTTGTGACCCATGGTGCCTGGCTTGCCTTGGCCCCAGCCCTCCTCCCTGTGCCGA
AATCATCTCTCTGTGGACCTTTCTCCCTCATGGACTCCCACCTCCTTGTGGGCAGGAACCAGCCCTTGGC
CATGTTCCGGCTCCCTAGTGCCCAGTATGTGTTTGGTGAATTTGGGGGCATGGGTTGGATGATCTTGGTT
CAGTTACCAAATCTTTCTTTCCTGTCCAATCAGTCTTCCAGGATCTCAACCAGTTCTCTCACTGCAGAGT
CTGGAGAAGCCCAGCCCTCATTGTGAAGGGAGAGCCACCGTGGTGCTCACAGCAAGACACCCAGAGTCCC
TTCCAGACAGGGACACCCCTGGAGCGACCCTGTTTCAGAATGAAGTTATCTGGGTGGGAACTCACCAAGA
ATGCACAGAGGGCGCTGGGCTCCAAGCTTCAGCATATCCTTTCACTGGACTCCACACAGGCCTGCGGAGC
AGGTGGACCCACCATTCTCAGACCCCCCAGGGCCCCATAGACAGCAGATCTGCTGCTTTCAATCACACCC
ACTGCCTCTCATGCCGGAGTGGGGGAAATGGAACCCGCAAAGCCTGCAGGCCAGGGAGGGTGGGAAACTG
GGGTGATGTGAGCCCACAGGGTGGAGCACTGTGGACTGAATGCCTGTGTCCCCTGGGTTCATATGTTGAA
CCCCTAACTCCCAATGTGATGGTGTCAGGAGGTGGAGCCTTTGGGAGGTGGTTAGGCCGTGAGGGTGGAG
ACCCATGCTGGGGTTGGTGCCCTTATGGTTCTCCCATGTGAGGACACAGAGGGCAGCCATCTACAAGCCA
AGAAGAGAGGCCTCACCAGACACCAAACCTGCCGGCACCTTGCTGTGAGATTTCCAGCCCCCAGAGCTGT
GAGAAATAAATTTCTGTTGTTTAAGGCACTCAA
SEQ ID NO: 14 is the amino acid sequence for human RRM2. isoform 2.
>NP_001025.1 ribonucleoside-diphosphate reductase subunit M2 isoform 2
[Homo sapiens]
MLSLRVPLAPITDPQQLQLSPLKGLSLVDKENTPPALSGTRVLASKTARRIFQEPTEPKTKAAAPGVEDE
PLLRENPRRFVIFPIEYHDIWQMYKKAEASFWTAEEVDLSKDIQHWESLKPEERYFISHVLAFFAASDGI
VNENLVERFSQEVQITEARCFYGFQIAMENIHSEMYSLLIDTYIKDPKEREFLFNAIETMPCVKKKADWA
LRWIGDKEATYGERVVAFAAVEGIFFSGSFASIFWLKKRGLMPGLTFSNELISRDEGLHCDFACLMFKHL
VHKPSEERVREIIINAVRIEQEFLTEALPVKLIGMNCTLMKQYIEFVADRLMLELGFSKVFRVENPFDFM
ENISLEGKTNFFEKRVGEYQRMGVMSSPTENSFTLDADF
SEQ ID NO: 15 is the mRNA sequence for human RRM2, isoform 2.
>NM_001034.4 Homo sapiens ribonucleotide reductase regulatory subunit M2
(RRM2), transcript variant 2, mRNA
GTGCACCCTGTCCCAGCCGTCCTGTCCTGGCTGCTCGCTCTGCTTCGCTGCGCCTCCACTATGCTCTCCC
TCCGTGTCCCGCTCGCGCCCATCACGGACCCGCAGCAGCTGCAGCTCTCGCCGCTGAAGGGGCTCAGCTT
GGTCGACAAGGAGAACACGCCGCCGGCCCTGAGCGGGACCCGCGTCCTGGCCAGCAAGACCGCGAGGAGG
ATCTTCCAGGAGCCCACGGAGCCGAAAACTAAAGCAGCTGCCCCCGGCGTGGAGGATGAGCCGCTGCTGA
GAGAAAACCCCCGCCGCTTTGTCATCTTCCCCATCGAGTACCATGATATCTGGCAGATGTATAAGAAGGC
AGAGGCTTCCTTTTGGACCGCCGAGGAGGTGGACCTCTCCAAGGACATTCAGCACTGGGAATCCCTGAAA
CCCGAGGAGAGATATTTTATATCCCATGTTCTGGCTTTCTTTGCAGCAAGCGATGGCATAGTAAATGAAA
ACTTGGTGGAGCGATTTAGCCAAGAAGTTCAGATTACAGAAGCCCGCTGTTTCTATGGCTTCCAAATTGC
CATGGAAAACATACATTCTGAAATGTATAGTCTTCTTATTGACACTTACATAAAAGATCCCAAAGAAAGG
GAATTTCTCTTCAATGCCATTGAAACGATGCCTTGTGTCAAGAAGAAGGCAGACTGGGCCTTGCGCTGGA
TTGGGGACAAAGAGGCTACCTATGGTGAACGTGTTGTAGCCTTTGCTGCAGTGGAAGGCATTTTCTTTTC
CGGTTCTTTTGCGTCGATATTCTGGCTCAAGAAACGAGGACTGATGCCTGGCCTCACATTTTCTAATGAA
CTTATTAGCAGAGATGAGGGTTTACACTGTGATTTTGCTTGCCTGATGTTCAAACACCTGGTACACAAAC
CATCGGAGGAGAGAGTAAGAGAAATAATTATCAATGCTGTTCGGATAGAACAGGAGTTCCTCACTGAGGC
CTTGCCTGTGAAGCTCATTGGGATGAATTGCACTCTAATGAAGCAATACATTGAGTTTGTGGCAGACAGA
CTTATGCTGGAACTGGGTTTTAGCAAGGTTTTCAGAGTAGAGAACCCATTTGACTTTATGGAGAATATTT
CACTGGAAGGAAAGACTAACTTCTTTGAGAAGAGAGTAGGCGAGTATCAGAGGATGGGAGTGATGTCAAG
TCCAACAGAGAATTCTTTTACCTTGGATGCTGACTTCTAAATGAACTGAAGATGTGCCCTTACTTGGCTG
ATTTTTTTTTTCCATCTCATAAGAAAAATCAGCTGAAGTGTTACCAACTAGCCACACCATGAATTGTCCG
TAATGTTCATTAACAGCATCTTTAAAACTGTGTAGCTACCTCACAACCAGTCCTGTCTGTTTATAGTGCT
GGTAGTATCACCTTTTGCCAGAAGGCCTGGCTGGCTGTGACTTACCATAGCAGTGACAATGGCAGTCTTG
GCTTTAAAGTGAGGGGTGACCCTTTAGTGAGCTTAGCACAGCGGGATTAAACAGTCCTTTAACCAGCACA
GCCAGTTAAAAGATGCAGCCTCACTGCTTCAACGCAGATTTTAATGTTTACTTAAATATAAACCTGGCAC
TTTACAAACAAATAAACATTGTTTGTACTCACAAGGCGATAATAGCTTGATTTATTTGGTTTCTACACCA
AATACATTCTCCTGACCACTAATGGGAGCCAATTCACAATTCACTAAGTGACTAAAGTAAGTTAAACTTG
TGTAGACTAAGCATGTAATTTTTAAGTTTTATTTTAATGAATTAAAATATTTGTTAACCAACTTTAAAGT
CAGTCCTGTGTATACCTAGATATTAGTCAGTTGGTGCCAGATAGAAGACAGGTTGTGTTTTTATCCTGTG
GCTTGTGTAGTGTCCTGGGATTCTCTGCCCCCTCTGAGTAGAGTGTTGTGGGATAAAGGAATCTCTCAGG
GCAAGGAGCTTCTTAAGTTAAATCACTAGAAATTTAGGGGTGATCTGGGCCTTCATATGTGTGAGAAGCC
GTTTCATTTTATTTCTCACTGTATTTTCCTCAACGTCTGGTTGATGAGAAAAAATTCTTGAAGAGTTTTC
ATATGTGGGAGCTAAGGTAGTATTGTAAAATTTCAAGTCATCCTTAAACAAAATGATCCACCTAAGATCT
TGCCCCTGTTAAGTGGTGAAATCAACTAGAGGTGGTTCCTACAAGTTGTTCATTCTAGTTTTGTTTGGTG
TAAGTAGGTTGTGTGAGTTAATTCATTTATATTTACTATGTCTGTTAAATCAGAAATTTTTTATTATCTA
TGTTCTTCTAGATTTTACCTGTAGTTCATACTTCAGTCACCCAGTGTCTTATTCTGGCATTGTCTAAATC
TGAGCATTGTCTAGGGGGATCTTAAACTTTAGTAGGAAACCATGAGCTGTTAATACAGTTTCCATTCAAA
TATTAATTTCAGAATGAAACATAATTTTTTTTTTTTTTTTTGAGATGGAGTCTCGCTCTGTTGCCCAGGC
TGGAGTGCAGTGGCGCGATTTTGGCTCACTGTAACCTCCATCTCCTGGGTTCAAGCAATTCTCCTGTCTC
AGCCTCCCTAGTAGCTGGGACTGCAGGTATGTGCTACCACACCTGGCTAATTTTTGTATTTTTAGTAGAG
ATGGAGTTTCACCATATTGGTCAGGCTGGTCTTGAACTCCTGACCTCAGGTGATCCACCCACCTCGGCCT
CCCAAAGTGCTGGGATTGCAGGCGTGATAAACAAATATTCTTAATAGGGCTACTTTGAATTAATCTGCCT
TTATGTTTGGGAGAAGAAAGCTGAGACATTGCATGAAAGATGATGAGAGATAAATGTTGATCTTTTGGCC
CCATTTGTTAATTGTATTCAGTATTTGAACGTCGTCCTGTTTATTGTTAGTTTTCTTCATCATTTATTGT
ATAGACAATTTTTAAATCTCTGTAATATGATACATTTTCCTATCTTTTAAGTTATTGTTACCTAAAGTTA
ATCCAGATTATATGGTCCTTATATGTGTACAACATTAAAATGAAAGGCTTTGTCTTGCATTGTGAGGTAC
AGGCGGAAGTTGGAATCAGGTTTTAGGATTCTGTCTCTCATTAGCTGAATAATGTGAGGATTAACTTCTG
CCAGCTCAGACCATTTCCTAATCAGTTGAAAGGGAAACAAGTATTTCAGTCTCAAAATTGAATAATGCAC
AAGTCTTAAGTGATTAAAATAAAACTGTTCTTATGTCA
SEQ ID NO: 16 is the nucleotide sequence encoding mouse RRM2, isoform 2.
NCBI GeneID: 20135
SEQ ID NO: 17 is the amino acid sequence for mouse RRM2, isoform 2.
>NP_033130.1 ribonucleoside-diphosphate reductase subunit M2 [Mus musculus]
MLSVRTPLATIADQQQLQLSPLKRLTLADKENTPPTLSSTRVLASKAARRIFQDSAELESKAPTNPSVED
EPLLRENPRRFVVFPIEYHDIWQMYKKAEASFWTAEEVDLSKDIQHWEALKPDERHFISHVLAFFAASDG
IVNENLVERFSQEVQVTEARCFYGFQIAMENIHSEMYSLLIDTYIKDPKEREYLFNAIETMPCVKKKADW
ALRWIGDKEATYGERVVAFAAVEGIFFSGSFASIFWLKKRGLMPGLTFSNELISRDEGLHCDFACLMFKH
LVHKPAEQRVREIITNAVRIEQEFLTEALPVKLIGMNCTLMKQYIEFVADRLMLELGFNKIFRVENPFDF
MENISLEGKTNFFEKRVGEYQRMGVMSNSTENSFTLDADF
SEQ ID NO: 18 is the mRNA sequence for mouse RRM2, isoform 2.
>NM_009104.2 Mus musculus ribonucleotide reductase M2 (Rrm2), mRNA
TTTAAAGGGCGCGGGCGCTGGCAGTCGGCGGTGCACCGGATTCCAGCTGTTTTCGCCTGCTCCTCGCCGT
CTCCGCCGCTGCCCTCGTTCGCCATGCTCTCCGTCCGCACCCCGCTCGCCACCATCGCTGACCAGCAGCA
GCTGCAGTTGTCGCCGCTGAAGCGACTCACCCTGGCTGACAAGGAGAACACGCCCCCGACTCTCAGCAGC
ACCCGCGTCCTGGCCAGCAAAGCTGCGAGGAGAATCTTCCAGGACTCCGCCGAGCTGGAAAGTAAAGCGC
CTACTAACCCCAGCGTTGAGGATGAGCCGTTACTGAGAGAAAACCCCCGCCGCTTCGTTGTCTTTCCCAT
CGAGTACCATGATATCTGGCAGATGTACAAGAAAGCCGAGGCCTCCTTTTGGACTGCCGAGGAGGTGGAC
CTTTCCAAGGATATTCAGCACTGGGAAGCTCTGAAACCCGATGAGAGACATTTTATATCTCACGTTCTGG
CTTTCTTTGCAGCGAGTGATGGCATAGTCAATGAGAACTTGGTGGAGCGATTTAGCCAAGAAGTTCAAGT
TACAGAGGCCCGCTGTTTCTATGGCTTCCAAATTGCCATGGAAAACATACACTCTGAAATGTACAGTCTC
CTTATTGACACTTACATTAAAGATCCCAAGGAAAGAGAATATCTCTTCAATGCTATTGAAACAATGCCTT
GTGTGAAGAAGAAGGCTGACTGGGCCTTGCGCTGGATTGGGGACAAAGAGGCTACGTATGGAGAACGCGT
TGTGGCCTTTGCCGCCGTAGAAGGAATCTTCTTTTCCGGTTCTTTTGCATCGATATTCTGGCTCAAGAAA
CGGGGGCTGATGCCGGGCCTTACATTTTCCAATGAGCTTATTAGCAGAGACGAGGGTTTACACTGTGACT
TTGCCTGCCTGATGTTCAAGCACCTGGTACACAAGCCAGCAGAGCAGAGGGTCCGAGAGATAATCACCAA
CGCCGTTAGGATAGAGCAGGAGTTCCTCACGGAGGCCTTGCCCGTGAAGCTCATCGGGATGAACTGCACT
TTGATGAAGCAGTACATTGAGTTTGTGGCCGACAGGCTTATGCTGGAGCTGGGTTTTAACAAGATTTTCA
GAGTAGAAAATCCGTTTGACTTCATGGAAAATATCTCACTAGAAGGAAAGACAAACTTCTTTGAGAAGCG
AGTAGGCGAGTATCAGAGGATGGGAGTCATGTCGAATTCGACAGAGAACTCTTTTACCTTGGATGCTGAC
TTCTAAGTAACTGATCGTGTGTTCTTCGCTGATTTTTGTCCCCTTGCCATTAAAAGAAACCAGCAAAAAC
AACCAACTGGCTACACCATGAATTGTCATTAAATTTGCTAAACAGGTGTCTAAAAAGCTGTGTAGCTACC
TCAGTCCTGTTTGCCAGGCTGGTCACTAGAAGAAAGTATACTTCAAACAATGGGTACTTGGATCCTTAGG
GAGATCCTGTCCTTGGCTTTTACAAGTAGTGTGGTCACCTTTGACCTCATCAAAGTACTAACAGCACTGG
GCCAGGTTTTAGGAGCAGTGACCATCAAGCAAGCAGGTTTAAACATTTAGATGCTGTTTAGGGCTGTTTA
AAGATGTCGGACTGCTTCCTGCAGGCATGCAGGGTCTACTTAACAAGTTTGTAAATAAAATTGGCACTTT
GCACACACACACACATAGTGCTGTCAGGCGATTAAACTATACATTTTATGAGGTAGTACCTCTATGCTTT
TTTTTTTTTTTTTTAATGCTCAGTATTATCTTGAAGTTTGCAAATGCTATGATGGTACAGTAAATTCTGA
CATTTGCCCTAATAGTGTCACTTTTTTTTTTTCTTCGAGACAGAGTTTCTCTGTATAGCCCTGGCTGTAC
GGAATTCACAAGTGAGTTTGAGCCCAGTGGTGGGTACACCCGTGGGACTCTTACAAACCAAAACAGGAAA
AGCAAGTGTTCCCTGAGGTAGTTTACTGTGATCTAGCTTCCTCATGAACTGACATAACCCTGATCAGTTT
CCTTGATTATTGTATAGATGTTTTTGTAATATGAAAAGCCTTTGTACCTTTTAAATTATTGTTACTTAAA
ATTAATAAACTCTTGAATTAACAGTCTTGAACTTTCATGGCATACAAGTATTAAATGATTTAACTAAAAC
CTTAATGTCAAAAAAAAAAAAAAAAAAAA
SEQ ID NO: 19 is the nucleotide sequence encoding rat RRM2, isoform 2
GeneID: 362720
SEQ ID NO: 20 is the amino acid sequence for rat RRM2, isoform 2.
>NP_001020911.1 ribonucleoside-diphosphate reductase subunit M2
[Rattus norvegicus]
MLSVRAPLATIADQQQLHLSPLKRLSLADKENTPPTLSSARVLASKAARRIFQDSAELESKAPTKPSIEE
EPLLRENPRRFVVFPIEYHDIWQMYKKAEASFWTAEEVDLSKDIQHWEALKPDERHFISHVLAFFAASDG
IVNENLVERFSQEVQVTEARCFYGFQIAMENIHSEMYSLLIDTYIKDSKEREYLFNAIETMPCVKKKADW
ALRWIGDKEATYGERVVAFAAVEGIFFSGSFASIFWLKKRGLMPGLTFSNELISRDEGLHCDFACLMFKH
LVHKPSEQRVKEIITNSVRIEQEFLTEALPVKLIGMNCTLMKQYIEFVADRLMLELGFNKIFKVENPFDF
MENISLEGKTNFFEKRVGEYQRMGVMSNSTENSFTLDADF
SEQ ID NO: 21 is the mRNA sequence for rat RRM2, isoform 2.
>NM_001025740.1 Rattus norvegicus ribonucleotide reductase regulatory
subunit M2 (Rrm2), mRNA
TCCAGCTGTTCCCTCTTCTCCTCGTCCTCTCCACCTCTGCCTTCGTTCGCCATGCTCTCGGTCCGCGCCC
CGCTCGCCACCATCGCTGACCAGCAGCAGCTGCACTTGTCGCCCCTGAAGCGACTCAGTCTGGCTGACAA
GGAGAACACGCCCCCAACCCTCAGCAGCGCCCGCGTCCTGGCTAGCAAGGCTGCAAGGAGAATCTTCCAG
GACTCTGCCGAGCTGGAAAGTAAAGCACCCACTAAGCCCAGCATTGAGGAAGAGCCGTTACTGAGAGAAA
ATCCCCGCCGTTTCGTTGTCTTTCCCATCGAATACCATGATATCTGGCAGATGTACAAGAAAGCTGAGGC
CTCCTTTTGGACTGCCGAGGAGGTGGACCTTTCCAAGGATATTCAGCACTGGGAAGCTCTGAAACCAGAT
GAGAGACATTTTATATCTCATGTTCTGGCCTTCTTTGCGGCGAGTGACGGCATAGTCAATGAGAACTTGG
TGGAGCGATTTAGCCAAGAAGTTCAAGTCACAGAGGCCCGCTGTTTCTATGGCTTCCAAATTGCCATGGA
GAACATACACTCCGAAATGTACAGTCTCCTTATTGACACTTACATTAAAGATTCCAAAGAAAGAGAATAT
CTCTTCAACGCCATTGAGACAATGCCTTGTGTGAAGAAGAAGGCTGACTGGGCCTTGCGTTGGATTGGGG
ACAAAGAGGCTACGTATGGAGAACGAGTTGTGGCCTTCGCTGCGGTAGAAGGAATCTTCTTTTCTGGTTC
TTTTGCATCAATATTCTGGCTCAAGAAACGGGGACTGATGCCGGGCCTTACATTTTCCAATGAGCTTATT
AGCAGAGATGAGGGTCTGCACTGTGACTTTGCCTGCCTGATGTTCAAGCACCTGGTACACAAGCCCTCGG
AGCAGAGAGTAAAAGAAATAATTACCAACTCGGTCAGGATAGAGCAGGAGTTCCTCACAGAGGCCCTGCC
TGTGAAGCTCATCGGGATGAATTGCACCTTGATGAAGCAGTACATCGAGTTTGTGGCCGACAGGCTTATG
CTGGAGCTGGGTTTTAACAAGATTTTCAAAGTAGAAAATCCATTTGACTTCATGGAGAATATTTCACTAG
AAGGAAAAACAAACTTCTTTGAGAAGCGAGTAGGCGAGTACCAGAGGATGGGAGTAATGTCAAATTCGAC
AGAAAATTCTTTCACCTTGGATGCTGACTTCTAAGCAACCGATCCGTGTGCTCTTTGCTGATTATTCTCC
CCTTGTCATTAAAAGAAATCAGCAAAACCAAACAACTGGCTACACCACGAATTGTCGTTAAATTTGCTAA
CTGGTGTCTAAAAGCCGTGTAGCTACCTCGGTCCTGCTTGCTAGGTTTGCCACTAGAAGGAAGCATACTT
AAAACAATGGCTACTTGGATCCTCAGGGAGATCCTGTCTGCAAGTCGCGTGGTCACCCTTAGCTTCATCA
AAGCACTAACAGCTCACCCGGCCAGGCTTCATGAGCACTGACCCTCAAGCAAGCAGGTTTATTAAACATT
TAGATGCCAACCTCACTTACTGTTTCCTGCAGTCATGGAGAGTTTACTTAACAAGTTTGTAAATAATAAA
ACTGGCACTTTGCACACAGACTTGGTACTATCCTAGGGGAAGGCCTGCTTTATTTGGTTTCTAGACCGAG
TAGGAAGTGATCCATTTACCACTGAGGGCAGCCCCATTCAGAGTCTTAAGTGACTAAGCCAGTGTTGAAC
AAGCAATTTCCAGGCTTTGTTCTTCAGGGAACTTCCCATCAGCTTTGAAGTCGGTCCTGTGCACCCTAGG
CACATGGATCAGTTCACAAGTGGGGTTCAGTGGAGAGAACTTCCCCCTCAGAAGTCACTTGAAACTTAGA
TGAGATTTGGGACACTTGCTGGTTGACTCTGTCTCATTTGTGTAAAAAGTAGTTTTTTTTTTTTTTTTTT
TCCAAGTTATACTTTGTCCCATTCCTAGTTAGTACAAAGTCTTGAAAGGGCCTTTGTAGGGCTTTTTAAG
TCAGGGTCTTAACTATGTAACTCTGGCTTGGCCTGGAACTTGCTATGTAGACCAGGTTACCCTCAAACTT
GCCTGTCTTCCCAAATACTGGGATTAAGGTTTCTGTGACCATACCTGGCTTTACCTGATTAATTCCTAAA
CACCAGAAAACCAGTACTGTATGAGATGTTAATGTGTGTTCCTTTCAGACTGGAGTACAGACCAGTAGAT
AACAGATAACAGCTGGTTCACCTTAATCTGCCTTTTTGTGTATTAATCTGTGTTTAGAGAACGGAACAAT
AGCCAGAATTCACCTAGCGAGTTCGAGGCCAGTTGGTGTATATGTGGGACTCTTAACCAAAACAGCAAGC
GTTCCCTGGGGTAGTTCACAATGATCTCCAGCTTCCTTGTTAACCAGATAACTGCAAGTCAGATGTATGA
CCCTGGTTGGTTTATTGTATTGATATGTTTCTGTAATATGAGTAAATTATTGTTACTTAAAAGTAATAAA
CAAAATTGAAAAAAAAAAAAAAAAAAAAAAAAAA
SEQ ID NO: 22 is the nucleotide sequence encoding canine RRM2, isoform 2.
NCBI Gene ID: 482963
SEQ ID NO: 23 is the amino acid sequence for canine RRM2, isoform 2
>XP_540076.2 ribonucleoside-diphosphate reductase subunit M2 [Canis
lupus familiaris]
MLSVRVPLATIADPQQQQQQQLQLSPLKGLSLADKENTPPALSGTRVLASKTARRIFQEPAEPKTKVLAP
SAEEEPLLRENPRRFVIFPIEYHDIWQMYKKAEASFWTAEEVDLSKDIQHWESLKPEERYFISHVLAFFA
ASDGIVNENLVERFSQEVQITEARCFYGFQIAMENIHSEMYSLLIDTYIKDSKEREFLFNAIETMPCVKK
KADWALRWIGDKEATYGERVVAFAAVEGIFFSGSFASIFWLKKRGLMPGLTFSNELISRDEGLHCDFACL
MFKHLVHKPSEQRVKEIIINAVRIEQEFLTEALPVKLIGMNCTLMKQYIEFVADRLMLELGFSKVFRVEN
PFDEMENISLEGKTNFFEKRVGEYQRMGVMSSPTENSFTLDADF
SEQ ID NO: 24 is the mRNA sequence for canine RRM2, isoform 2
>XM_540076.6 PREDICTED: Canis lupus familiaris ribonucleotide reductase
regulatory subunit M2 (RRM2), mRNA
TGCGCCGCCGCCGCCGCCGAGCCCGCCTGCCGCCGCCATGCTCTCCGTCCGCGTCCCGCTCGCCACCATC
GCGGACCCCCAGCAGCAGCAGCAGCAGCAGCTCCAGCTCTCGCCCCTCAAGGGGCTCAGCCTGGCGGACA
AGGAGAACACGCCCCCGGCCCTCAGCGGCACCCGCGTGCTGGCCAGCAAGACCGCCCGGAGGATCTTCCA
GGAGCCCGCCGAGCCGAAAACTAAGGTACTTGCCCCCAGCGCGGAGGAGGAACCACTGCTGAGAGAAAAC
CCCCGTCGCTTTGTCATCTTCCCTATCGAGTACCATGATATTTGGCAGATGTATAAGAAAGCGGAGGCTT
CCTTTTGGACAGCCGAAGAGGTGGATCTTTCCAAGGACATTCAGCACTGGGAATCCCTGAAGCCTGAGGA
GAGATATTTTATATCCCATGTTCTGGCTTTCTTTGCAGCGAGCGATGGCATAGTAAATGAAAACTTGGTG
GAGCGGTTTAGCCAAGAAGTTCAGATTACGGAAGCCCGCTGTTTCTATGGCTTCCAAATTGCCATGGAAA
ACATCCACTCTGAGATGTATAGTCTCCTCATTGACACTTATATTAAAGATTCCAAAGAAAGGGAATTTCT
CTTCAACGCCATTGAGACGATGCCTTGTGTAAAGAAGAAGGCAGATTGGGCCTTGCGTTGGATTGGGGAC
AAAGAAGCTACCTATGGAGAACGGGTTGTGGCCTTTGCTGCCGTGGAAGGAATCTTCTTTTCGGGTTCTT
TTGCGTCAATATTCTGGCTCAAGAAACGGGGCCTGATGCCTGGCCTCACGTTTTCCAATGAACTTATTAG
CAGAGATGAGGGTTTACACTGTGACTTTGCCTGCCTGATGTTCAAACACCTGGTCCACAAACCTTCAGAG
CAGAGGGTGAAGGAAATAATTATCAATGCCGTTAGGATAGAACAGGAGTTCCTCACGGAGGCTTTGCCAG
TGAAGCTCATTGGGATGAATTGCACGTTAATGAAGCAGTATATTGAATTCGTGGCAGACCGACTTATGCT
GGAGCTCGGTTTTAGCAAGGTTTTCAGAGTAGAAAATCCATTTGACTTTATGGAGAATATTTCACTGGAA
GGGAAGACTAACTTCTTTGAGAAGAGAGTAGGCGAGTATCAGAGGATGGGAGTGATGTCAAGTCCAACAG
AGAATTCGTTTACCTTGGATGCTGACTTCTAAGTGAATGAAGATGTGCTCTTTGCTGATTTTTTTTTTTC
CCTTTCTCATCCAAAAAAAAAAAAATCAGCTACTTGAAGTGTATCAAACCAGCTACACCATGAATCATCC
ATAACGTTCATTAATAGTATTGTTAAAACTGTGTAGCTACCTCATAAGCAAGCCTGTTGATCAGTTAATG
CTAGTCGTCTCACCCAGAAAGAAGCATAGACAAAAAGCTACTCGGATTCTTAATGAAAGATATTGGCCGT
GTTTGGCTTTTGCGGGCAGGCTGGCTGTCCACTGACTTCACAGTGGCTCTTGGTGGCAGTCAGGTCTCAA
AAGTGTGGGGACTCAAGTGAGTCTGATCTAGCACGATTAATTAGTTAGTCTAAGGCCCTTGGGCGGTGTC
AGCCTCTGTGCTTCAAAGCAGATTTTTAAGTTTACGTACCGATTTTTATATAAAACTGGCACTTTACACA
CAAATAAACATAGTTTGTACTGTTGAAATAAAGGCTTGATTTAACTTAATCTGGTTTCTAGCCCAAATGC
AGAGCATTCTATTGACCACTAATGGGAGCCAGTTTGCAATTTACTAGGTAACCAAAAAGTCCATCAAACC
TGTGTGAATCAAGCATGTTATTTCTGTTTATTTTCTATAATGAATTGATGTTCTCTTTAATCAACTTTAA
AGTCAATCCTTCATATACCTAGGTATTAGCCACTTGGTGCCATGAAGAAACGCAGGTTGTGTTTTATATT
TTGGAGGCCAGGTCAAGTATTGTGGATAAGAGGGGAAAGGAGGTTCCAATTAAATCATTAGAGCTTGAAG
TGTGATGTAGGCTGACTGCTGGTCGCCTGGGGGTGTGCGAGGATCAGCATCCTTTTATTTCTCAAACCAC
ATTTTCCCCCACCTTGAGTTCTTATAGAAAGAAGATCCTTAGATCCTTAGCTGTAGGGTCTGAGATAATA
TTGTAAATTGATTTTGAAATCAATCCTTGCACGAATTGACCCGCTTAGGATCTTGCTCCAATTAAGTGGC
ACAACCAGAACTGAAATTGGCTCCCCGGAAAGTTGAGCATTTTCTCTGATTTGGTCTAATTTGTAAGTAG
GTAATGTTGACCTAATCCATTTGTGTCTACTACATGTTTTTTCAATTAGATATTTCTTCTGTTTTTTTGT
TCTTTTATATCTGGTTCATATTTTGAAATAATTGCTCAGTTAGTGCAGTTCATGATTGGAGCAGATAGTC
TTCAGGGCACTTACTTCCAGCTTTTGCCTCAATCTGAGCATTACCTTGTTGGATTCCTGACCTGCAGTAG
AAAACTAGAGTTGCATGAGCTATATTAATACAGGTTCTGTTCACACAGTAATTTTAGAAAGAAGTATAAA
ATAATATACTTAATAGGATTAGTTTGAATCAACCTGTCTTTGTGTTACCCCTGCTTTCTCCCTCCCCATC
AAAAAAAAAAAAAAAGAAAAAAAAACAAAAAACCCAGCCAGGAGGTTACGAGAAGGTGGTGGATGATACG
CACTGATCCTTTGGCCACATTTGTTAACCTGTCTTTTTGTGTTGGGTGATCACTGACCTGTTTTTTTGTC
AGTTTTCTTCATTTATTGTATAAATTGTCAAATAGTCAATTTAAAAATTTCTGTAACGGTGGCTGTCTTT
TAAATTATTGTTACCTGAAGTGAATCTAGATAATGTGGTTCTTACCCTTGTGCAACACAAAGGTGAATAA
ACGTTTTTGCCTCGCGTGTCGGGTGCAGACGGAA
SEQ ID NO: 25 is an exemplary nucleic acid sequence comprising a Kozak sequence, RRM1,
P2A, and RRM2.
GCTAGCGAATTCGCCACCATGCACGTCATCAAGAGAGACGGGAGGCAGGAAAGAGTCATGTTCGATAAAATCACTTCAAGAATCCA
GAAACTGTGTTACGGGCTGAACATGGACTTCGTCGATCCTGCCCAGATTACCATGAAAGTGATCCAGGGACTGTACTCTGGCGTCA
CCACAGTGGAGCTGGACACACTGGCCGCTGAAACCGCAGCCACACTGACTACCAAACACCCAGATTATGCAATTCTGGCTGCACGG
ATCGCCGTGAGTAATCTGCATAAGGAGACAAAGAAAGTCTTCTCAGACGTGATGGAGGACCTGTACAATTATATCAACCCTCACAA
TGGGAAACATTCACCAATGGTCGCTAAGAGCACTCTGGACATTGTGCTGGCCAACAAAGATCGGCTGAACAGCGCTATCATCTACG
ACCGGGATTTCAGTTACAACTACTTCGGCTTTAAGACACTGGAGAGATCATATCTGCTGAAAATCAATGGGAAGGTGGCCGAACGG
CCTCAGCACATGCTGATGAGAGTCAGCGTGGGCATTCATAAGGAGGACATTGATGCCGCTATCGAAACTTACAACCTGCTGAGCGA
GCGCTGGTTCACCCACGCTTCCCCTACACTGTTTAACGCAGGAACCAATCGACCACAGCTGAGCAGCTGCTTCCTGCTGAGCATGA
AGGACGATTCCATCGAGGGCATCTACGACACCCTGAAACAGTGCGCACTGATTTCTAAGAGTGCCGGCGGGATCGGAGTCGCTGTG
AGTTGTATTCGGGCAACCGGCTCATATATCGCCGGCACAAACGGCAACAGCAACGGGCTGGTCCCCATGCTGAGGGTGTACAACAA
TACAGCCCGCTATGTGGATCAGGGAGGCAACAAGAGACCAGGAGCATTTGCCATCTACCTGGAACCCTGGCACCTGGACATTTTCG
AGTTTCTGGATCTGAAGAAAAATACTGGCAAAGAGGAACAGAGGGCTCGCGACCTGTTCTTTGCACTGTGGATTCCCGACCTGTTC
ATGAAGAGGGTGGAGACCAACCAGGACTGGAGCCTGATGTGCCCCAATGAGTGTCCTGGGCTGGATGAAGTGTGGGGAGAGGAATT
TGAAAAACTGTACGCCAGTTATGAGAAGCAGGGCCGAGTGCGGAAAGTGGTCAAGGCCCAGCAGCTGTGGTACGCTATCATTGAGA
GCCAGACAGAAACTGGCACCCCCTACATGCTGTATAAAGACTCTTGCAACCGCAAGAGTAACCAGCAGAATCTGGGGACCATCAAA
TGCAGCAATCTGTGTACAGAGATTGTGGAATATACTTCCAAGGATGAGGTCGCCGTGTGTAACCTGGCATCACTGGCCCTGAATAT
GTACGTCACAAGCGAGCACACTTATGACTTCAAGAAACTGGCTGAAGTGACCAAAGTGGTCGTGAGGAATCTGAACAAGATCATTG
ACATCAACTACTATCCCGTGCCTGAGGCCTGCCTGAGCAATAAGAGACATAGGCCCATCGGGATTGGAGTGCAGGGCCTGGCTGAC
GCATTCATCCTGATGCGCTACCCTTTTGAGTCCGCCGAAGCTCAGCTGCTGAACAAGCAGATTTTTGAAACAATCTACTACGGGGC
TCTGGAGGCATCTTGTGACCTGGCCAAAGAACAGGGACCCTACGAGACTTATGAAGGCTCCCCTGTGTCTAAGGGCATCCTGCAGT
ACGATATGTGGAACGTCACACCAACTGACCTGTGGGATTGGAAAGTGCTGAAGGAGAAAATTGCAAAGTATGGCATCCGGAACAGC
CTGCTGATCGCCCCAATGCCCACTGCCTCTACCGCTCAGATTCTGGGCAACAATGAGTCCATCGAACCATACACTTCTAACATCTA
CACCCGGAGAGTCCTGAGCGGGGAGTTCCAGATCGTGAATCCCCACCTGCTGAAAGACCTGACCGAACGGGGACTGTGGCATGAGG
AAATGAAGAACCAGATCATTGCCTGCAATGGCAGTATCCAGTCAATTCCTGAGATCCCAGACGATCTGAAACAGCTGTACAAGACA
GTCTGGGAGATCAGCCAGAAAACTGTGCTGAAGATGGCAGCCGAAAGAGGGGCTTTCATTGATCAGTCACAGAGCCTGAACATCCA
CATTGCCGAGCCCAATTACGGAAAGCTGACCTCCATGCATTTTTATGGGTGGAAACAGGGACTGAAGACTGGCATGTACTATCTGC
GCACCCGACCAGCTGCAAACCCCATCCAGTTTACCCTGAATAAGGAGAAACTGAAGGACAAAGAAAAGGTGTCCAAAGAGGAAGAG
GAAAAGGAGAGAAACACAGCCGCTATGGTGTGTTCTCTGGAGAATAGGGATGAATGCCTGATGTGTGGCAGTGGAAGCGGAGCTAC
TAACTTCAGCCTGCTGAAGCAGGCTGGAGACGTGGAGGAGAACCCTGGACCTCTGAGTCTGAGGGTCCCACTGGCACCTATCACCG
ATCCACAGCAGCTGCAGCTGAGCCCACTGAAAGGCCTGAGTCTGGTCGATAAAGAGAACACACCACCTGCACTGAGTGGCACTCGG
GTGCTGGCATCAAAGACCGCCCGGAGAATTTTCCAGGAGCCAACCGAACCCAAAACAAAGGCCGCTGCACCTGGGGTCGAGGACGA
ACCACTGCTGAGAGAGAATCCCAGGCGCTTCGTGATTTTTCCTATCGAATACCACGATATTTGGCAGATGTATAAGAAAGCTGAGG
CAAGTTTCTGGACAGCTGAGGAAGTGGACCTGAGCAAAGACATCCAGCACTGGGAATCCCTGAAGCCAGAGGAAAGGTACTTCATT
TCTCATGTGCTGGCATTCTTTGCCGCTAGTGACGGGATCGTGAACGAGAATCTGGTCGAACGCTTTAGCCAGGAGGTGCAGATCAC
TGAAGCCCGATGCTTCTATGGATTTCAGATTGCTATGGAGAACATCCATTCAGAAATGTACAGCCTGCTGATTGACACCTATATCA
AAGATCCTAAGGAGCGCGAGTTCCTGTTTAATGCCATTGAGACAATGCCATGTGTGAAGAAAAAGGCAGACTGGGCTCTGCGATGG
ATCGGCGATAAGGAGGCTACTTACGGGGAAAGAGTGGTCGCATTCGCAGCCGTGGAGGGAATTTTCTTTTCTGGCAGTTTCGCTTC
CATCTTTTGGCTGAAAAAGCGAGGCCTGATGCCTGGGCTGACCTTTTCCAACGAGCTGATTTCTCGCGACGAAGGCCTGCACTGCG
ATTTCGCCTGTCTGATGTTTAAACACCTGGTGCATAAGCCCTCTGAGGAACGAGTCCGGGAGATCATTATCAACGCAGTGAGGATC
GAGCAGGAGTTCCTGACAGAAGCCCTGCCTGTCAAACTGATTGGCATGAATTGCACTCTGATGAAGCAGTACATCGAGTTTGTGGC
CGACAGGCTGATGCTGGAACTGGGATTCTCAAAGGTGTTTCGCGTCGAGAACCCATTCGATTTTATGGAGAATATCAGCCTGGAAG
GCAAAACAAACTTCTTTGAGAAGAGAGTCGGGGAATATCAGAGGATGGGCGTGATGAGCAGCCCCACTGAGAATAGCTTCACCCTG
GACGCCGATTTTTGAGCTAGC
SEQ ID NO: 26 is an exemplary Kozak sequence (as found in SEQ ID NO: 25).
GCCACC
SEQ ID NO: 27 is an exemplary RRM1 sequence (as found in SEQ ID NO: 25).
ATGCACGTCATCAAGAGAGACGGGAGGCAGGAAAGAGTCATGTTCGATAAAATCACTTCAAGAATCCAGAAACTGTGTTACGGGCT
GAACATGGACTTCGTCGATCCTGCCCAGATTACCATGAAAGTGATCCAGGGACTGTACTCTGGCGTCACCACAGTGGAGCTGGACA
CACTGGCCGCTGAAACCGCAGCCACACTGACTACCAAACACCCAGATTATGCAATTCTGGCTGCACGGATCGCCGTGAGTAATCTG
CATAAGGAGACAAAGAAAGTCTTCTCAGACGTGATGGAGGACCTGTACAATTATATCAACCCTCACAATGGGAAACATTCACCAAT
GGTCGCTAAGAGCACTCTGGACATTGTGCTGGCCAACAAAGATCGGCTGAACAGCGCTATCATCTACGACCGGGATTTCAGTTACA
ACTACTTCGGCTTTAAGACACTGGAGAGATCATATCTGCTGAAAATCAATGGGAAGGTGGCCGAACGGCCTCAGCACATGCTGATG
AGAGTCAGCGTGGGCATTCATAAGGAGGACATTGATGCCGCTATCGAAACTTACAACCTGCTGAGCGAGCGCTGGTTCACCCACGC
TTCCCCTACACTGTTTAACGCAGGAACCAATCGACCACAGCTGAGCAGCTGCTTCCTGCTGAGCATGAAGGACGATTCCATCGAGG
GCATCTACGACACCCTGAAACAGTGCGCACTGATTTCTAAGAGTGCCGGCGGGATCGGAGTCGCTGTGAGTTGTATTCGGGCAACC
GGCTCATATATCGCCGGCACAAACGGCAACAGCAACGGGCTGGTCCCCATGCTGAGGGTGTACAACAATACAGCCCGCTATGTGGA
TCAGGGAGGCAACAAGAGACCAGGAGCATTTGCCATCTACCTGGAACCCTGGCACCTGGACATTTTCGAGTTTCTGGATCTGAAGA
AAAATACTGGCAAAGAGGAACAGAGGGCTCGCGACCTGTTCTTTGCACTGTGGATTCCCGACCTGTTCATGAAGAGGGTGGAGACC
AACCAGGACTGGAGCCTGATGTGCCCCAATGAGTGTCCTGGGCTGGATGAAGTGTGGGGAGAGGAATTTGAAAAACTGTACGCCAG
TTATGAGAAGCAGGGCCGAGTGCGGAAAGTGGTCAAGGCCCAGCAGCTGTGGTACGCTATCATTGAGAGCCAGACAGAAACTGGCA
CCCCCTACATGCTGTATAAAGACTCTTGCAACCGCAAGAGTAACCAGCAGAATCTGGGGACCATCAAATGCAGCAATCTGTGTACA
GAGATTGTGGAATATACTTCCAAGGATGAGGTCGCCGTGTGTAACCTGGCATCACTGGCCCTGAATATGTACGTCACAAGCGAGCA
CACTTATGACTTCAAGAAACTGGCTGAAGTGACCAAAGTGGTCGTGAGGAATCTGAACAAGATCATTGACATCAACTACTATCCCG
TGCCTGAGGCCTGCCTGAGCAATAAGAGACATAGGCCCATCGGGATTGGAGTGCAGGGCCTGGCTGACGCATTCATCCTGATGCGC
TACCCTTTTGAGTCCGCCGAAGCTCAGCTGCTGAACAAGCAGATTTTTGAAACAATCTACTACGGGGCTCTGGAGGCATCTTGTGA
CCTGGCCAAAGAACAGGGACCCTACGAGACTTATGAAGGCTCCCCTGTGTCTAAGGGCATCCTGCAGTACGATATGTGGAACGTCA
CACCAACTGACCTGTGGGATTGGAAAGTGCTGAAGGAGAAAATTGCAAAGTATGGCATCCGGAACAGCCTGCTGATCGCCCCAATG
CCCACTGCCTCTACCGCTCAGATTCTGGGCAACAATGAGTCCATCGAACCATACACTTCTAACATCTACACCCGGAGAGTCCTGAG
CGGGGAGTTCCAGATCGTGAATCCCCACCTGCTGAAAGACCTGACCGAACGGGGACTGTGGCATGAGGAAATGAAGAACCAGATCA
TTGCCTGCAATGGCAGTATCCAGTCAATTCCTGAGATCCCAGACGATCTGAAACAGCTGTACAAGACAGTCTGGGAGATCAGCCAG
AAAACTGTGCTGAAGATGGCAGCCGAAAGAGGGGCTTTCATTGATCAGTCACAGAGCCTGAACATCCACATTGCCGAGCCCAATTA
CGGAAAGCTGACCTCCATGCATTTTTATGGGTGGAAACAGGGACTGAAGACTGGCATGTACTATCTGCGCACCCGACCAGCTGCAA
ACCCCATCCAGTTTACCCTGAATAAGGAGAAACTGAAGGACAAAGAAAAGGTGTCCAAAGAGGAAGAGGAAAAGGAGAGAAACACA
GCCGCTATGGTGTGTTCTCTGGAGAATAGGGATGAATGCCTGATGTGTGGCAGT
SEQ ID NO: 28 is an exemplary P2A sequence (as found in SEQ ID NO: 25).
GCTACTAACTTCAGCCTGCTGAAGCAGGCTGGAGACGTGGAGGAGAACCCTGGACCT
SEQ ID NO: 29-CK8 promoter

| | |
|---|---|
| ctagactagc atgctgccca tgtaaggagg caaggcctgg ggacacccga gatgcctggt | 60 |
| tataattaac ccagacatgt ggctgccccc ccccccccaa cacctgctgc ctctaaaaat | 120 |
| aaccctgcat gccatgttcc cggcgaaggg ccagctgtcc cccgccagct agactcagca | 180 |
| cttagtttag gaaccagtga gcaagtcagc ccttggggca gcccatacaa ggccatgggg | 240 |
| ctgggcaagc tgcacgcctg ggtccggggt gggcacggtg cccgggcaac gagctgaaag | 300 |
| ctcatctgct ctcaggggcc cctccctggg gacagcccct cctggctagt cacaccctgt | 360 |
| aggctcctct atataaccca ggggcacagg ggctgccctc attctaccac cacctccaca | 420 |
| gcacagacag acactcagga gccagccagc | 450 |

SEQ ID NO: 30-hum-cTnT455

| | |
|---|---|
| ctgctcccag ctggccctcc caggcctggg ttgctggcct ctgctttatc aggattctca | 60 |
| agagggacag ctggtttatg ttgcatgact gttccctgca tatctgctct ggttttaaat | 120 |
| agcttatctg ctagcctgct cccagctggc cctcccaggc ctgggttgct ggcctctgct | 180 |
| ttatcaggat tctcaagagg gacagctggt ttatgttgca tgactgttcc ctgcatatct | 240 |
| gctctggttt taaatagctt atctgagcag ctggaggacc acatgggctt atatggggca | 300 |
| cctgccaaaa tagcagccaa cacccccccc tgtcgcacat tcctccctgg ctcaccaggc | 360 |
| cccagcccac atgcctgctt aaagccctct ccatcctctg cctcacccag tccccgctga | 420 |
| gactgagcag acgcctccag gatctgtcgg cagct | 455 |

```
SEQ ID NO: 31-Homo sapiens dystrophin (DMD) gene
GeneID: 1756
SEQ ID NO: 32-Homo sapiens dystrophin mRNA-transcript variant Dp427m, mRNA
>NM_004006.3 Homo sapiens dystrophin (DMD), transcript variant Dp427m, mRNA
ATCAGTTACTGTGTTGACTCACTCAGTGTTGGGATCACTCACTTTCCCCCTACAGGACTCAGATCTGGGA
GGCAATTACCTTCGGAGAAAAACGAATAGGAAAAACTGAAGTGTTACTTTTTTTAAAGCTGCTGAAGTTT
GTTGGTTTCTCATTGTTTTTAAGCCTACTGGAGCAATAAAGTTTGAAGAACTTTTACCAGGTTTTTTTTA
TCGCTGCCTTGATATACACTTTTCAAAATGCTTTGGTGGGAAGAAGTAGAGGACTGTTATGAAAGAGAAG
ATGTTCAAAAGAAAACATTCACAAAATGGGTAAATGCACAATTTTCTAAGTTTGGGAAGCAGCATATTGA
GAACCTCTTCAGTGACCTACAGGATGGGAGGCGCCTCCTAGACCTCCTCGAAGGCCTGACAGGGCAAAAA
CTGCCAAAAGAAAAAGGATCCACAAGAGTTCATGCCCTGAACAATGTCAACAAGGCACTGCGGGTTTTGC
AGAACAATAATGTTGATTTAGTGAATATTGGAAGTACTGACATCGTAGATGGAAATCATAAACTGACTCT
TGGTTTGATTTGGAATATAATCCTCCACTGGCAGGTCAAAAATGTAATGAAAAATATCATGGCTGGATTG
CAACAAACCAACAGTGAAAAGATTCTCCTGAGCTGGGTCCGACAATCAACTCGTAATTATCCACAGGTTA
ATGTAATCAACTTCACCACCAGCTGGTCTGATGGCCTGGCTTTGAATGCTCTCATCCATAGTCATAGGCC
AGACCTATTTGACTGGAATAGTGTGGTTTGCCAGCAGTCAGCCACACAACGACTGGAACATGCATTCAAC
ATCGCCAGATATCAATTAGGCATAGAGAAACTACTCGATCCTGAAGATGTTGATACCACCTATCCAGATA
AGAAGTCCATCTTAATGTACATCACATCACTCTTCCAAGTTTTGCCTCAACAAGTGAGCATTGAAGCCAT
CCAGGAAGTGGAAATGTTGCCAAGGCCACCTAAAGTGACTAAAGAAGAACATTTTCAGTTACATCATCAA
ATGCACTATTCTCAACAGATCACGGTCAGTCTAGCACAGGGATATGAGAGAACTTCTTCCCCTAAGCCTC
GATTCAAGAGCTATGCCTACACACAGGCTGCTTATGTCACCACCTCTGACCCTACACGGAGCCCATTTCC
TTCACAGCATTTGGAAGCTCCTGAAGACAAGTCATTTGGCAGTTCATTGATGGAGAGTGAAGTAAACCTG
GACCGTTATCAAACAGCTTTAGAAGAAGTATTATCGTGGCTTCTTTCTGCTGAGGACACATTGCAAGCAC
AAGGAGAGATTTCTAATGATGTGGAAGTGGTGAAAGACCAGTTTCATACTCATGAGGGGTACATGATGGA
TTTGACAGCCCATCAGGGCCGGGTTGGTAATATTCTACAATTGGGAAGTAAGCTGATTGGAACAGGAAAA
TTATCAGAAGATGAAGAAACTGAAGTACAAGAGCAGATGAATCTCCTAAATTCAAGATGGGAATGCCTCA
GGGTAGCTAGCATGGAAAAACAAAGCAATTTACATAGAGTTTTAATGGATCTCCAGAATCAGAAACTGAA
AGAGTTGAATGACTGGCTAACAAAAACAGAAGAAAGAACAAGGAAAATGGAGGAAGAGCCTCTTGGACCT
GATCTTGAAGACCTAAAACGCCAAGTACAACAACATAAGGTGCTTCAAGAAGATCTAGAACAAGAACAAG
TCAGGGTCAATTCTCTCACTCACATGGTGGTGGTAGTTGATGAATCTAGTGGAGATCACGCAACTGCTGC
TTTGGAAGAACAACTTAAGGTATTGGGAGATCGATGGGCAAACATCTGTAGATGGACAGAAGACCGCTGG
GTTCTTTTACAAGACATCCTTCTCAAATGGCAACGTCTTACTGAAGAACAGTGCCTTTTTAGTGCATGGC
TTTCAGAAAAAGAAGATGCAGTGAACAAGATTCACACAACTGGCTTTAAAGATCAAAATGAAATGTTATC
AAGTCTTCAAAAACTGGCCGTTTTAAAAGCGGATCTAGAAAAGAAAAAGCAATCCATGGGCAAACTGTAT
TCACTCAAACAAGATCTTCTTTCAACACTGAAGAATAAGTCAGTGACCCAGAAGACGGAAGCATGGCTGG
ATAACTTTGCCCGGTGTTGGGATAATTTAGTCCAAAAACTTGAAAAGAGTACAGCACAGATTTCACAGGC
TGTCACCACCACTCAGCCATCACTAACACAGACAACTGTAATGGAAACAGTAACTACGGTGACCACAAGG
GAACAGATCCTGGTAAAGCATGCTCAAGAGGAACTTCCACCACCACCTCCCCAAAAGAAGAGGCAGATTA
CTGTGGATTCTGAAATTAGGAAAAGGTTGGATGTTGATATAACTGAACTTCACAGCTGGATTACTCGCTC
AGAAGCTGTGTTGCAGAGTCCTGAATTTGCAATCTTTCGGAAGGAAGGCAACTTCTCAGACTTAAAAGAA
AAAGTCAATGCCATAGAGCGAGAAAAAGCTGAGAAGTTCAGAAAACTGCAAGATGCCAGCAGATCAGCTC
AGGCCCTGGTGGAACAGATGGTGAATGAGGGTGTTAATGCAGATAGCATCAAACAAGCCTCAGAACAACT
GAACAGCCGGTGGATCGAATTCTGCCAGTTGCTAAGTGAGAGACTTAACTGGCTGGAGTATCAGAACAAC
ATCATCGCTTTCTATAATCAGCTACAACAATTGGAGCAGATGACAACTACTGCTGAAAACTGGTTGAAAA
TCCAACCCACCACCCCATCAGAGCCAACAGCAATTAAAAGTCAGTTAAAAATTTGTAAGGATGAAGTCAA
CCGGCTATCAGATCTTCAACCTCAAATTGAACGATTAAAAATTCAAAGCATAGCCCTGAAAGAGAAAGGA
CAAGGACCCATGTTCCTGGATGCAGACTTTGTGGCCTTTACAAATCATTTTAAGCAAGTCTTTTCTGATG
TGCAGGCCAGAGAGAAAGAGCTACAGACAATTTTTGACACTTTGCCACCAATGCGCTATCAGGAGACCAT
GAGTGCCATCAGGACATGGGTCCAGCAGTCAGAAACCAAACTCTCCATACCTCAACTTAGTGTCACCGAC
TATGAAATCATGGAGCAGAGACTCGGGGAATTGCAGGCTTTACAAAGTTCTCTGCAAGAGCAACAAAGTG
GCCTATACTATCTCAGCACCACTGTGAAAGAGATGTCGAAGAAAGCGCCCTCTGAAATTAGCCGGAAATA
TCAATCAGAATTTGAAGAAATTGAGGGACGCTGGAAGAAGCTCTCCTCCCAGCTGGTTGAGCATTGTCAA
AAGCTAGAGGAGCAAATGAATAAACTCCGAAAAATTCAGAATCACATACAAACCCTGAAGAAATGGATGG
CTGAAGTTGATGTTTTTCTGAAGGAGGAATGGCCTGCCCTTGGGGATTCAGAAATTCTAAAAAAGCAGCT
GAAACAGTGCAGACTTTTAGTCAGTGATATTCAGACAATTCAGCCCAGTCTAAACAGTGTCAATGAAGGT
GGGCAGAAGATAAAGAATGAAGCAGAGCCAGAGTTTGCTTCGAGACTTGAGACAGAACTCAAAGAACTTA
ACACTCAGTGGGATCACATGTGCCAACAGGTCTATGCCAGAAAGGAGGCCTTGAAGGGAGGTTTGGAGAA
AACTGTAAGCCTCCAGAAAGATCTATCAGAGATGCACGAATGGATGACACAAGCTGAAGAAGAGTATCTT
GAGAGAGATTTTGAATATAAAACTCCAGATGAATTACAGAAAGCAGTTGAAGAGATGAAGAGAGCTAAAG
AAGAGGCCCAACAAAAAGAAGCGAAAGTGAAACTCCTTACTGAGTCTGTAAATAGTGTCATAGCTCAAGC
TCCACCTGTAGCACAAGAGGCCTTAAAAAAGGAACTTGAAACTCTAACCACCAACTACCAGTGGCTCTGC
ACTAGGCTGAATGGGAAATGCAAGACTTTGGAAGAAGTTTGGGCATGTTGGCATGAGTTATTGTCATACT
TGGAGAAAGCAAACAAGTGGCTAAATGAAGTAGAATTTAAACTTAAAACCACTGAAAACATTCCTGGCGG
AGCTGAGGAAATCTCTGAGGTGCTAGATTCACTTGAAAATTTGATGCGACATTCAGAGGATAACCCAAAT
CAGATTCGCATATTGGCACAGACCCTAACAGATGGCGGAGTCATGGATGAGCTAATCAATGAGGAACTTG
AGACATTTAATTCTCGTTGGAGGGAACTACATGAAGAGGCTGTAAGGAGGCAAAAGTTGCTTGAACAGAG
CATCCAGTCTGCCCAGGAGACTGAAAAATCCTTACACTTAATCCAGGAGTCCCTCACATTCATTGACAAG
CAGTTGGCAGCTTATATTGCAGACAAGGTGGACGCAGCTCAAATGCCTCAGGAAGCCCAGAAAATCCAAT
CTGATTTGACAAGTCATGAGATCAGTTTAGAAGAAATGAAGAAACATAATCAGGGGAAGGAGGCTGCCCA
AAGAGTCCTGTCTCAGATTGATGTTGCACAGAAAAAATTACAAGATGTCTCCATGAAGTTTCGATTATTC
CAGAAACCAGCCAATTTTGAGCAGCGTCTACAAGAAAGTAAGATGATTTTAGATGAAGTGAAGATGCACT
TGCCTGCATTGGAAACAAAGAGTGTGGAACAGGAAGTAGTACAGTCACAGCTAAATCATTGTGTGAACTT
GTATAAAAGTCTGAGTGAAGTGAAGTCTGAAGTGGAAATGGTGATAAAGACTGGACGTCAGATTGTACAG
AAAAAGCAGACGGAAAATCCCAAAGAACTTGATGAAAGAGTAACAGCTTTGAAATTGCATTATAATGAGC
TGGGAGCAAAGGTAACAGAAAGAAAGCAACAGTTGGAGAAATGCTTGAAATTGTCCCGTAAGATGCGAAA
GGAAATGAATGTCTTGACAGAATGGCTGGCAGCTACAGATATGGAATTGACAAAGAGATCAGCAGTTGAA
GGAATGCCTAGTAATTTGGATTCTGAAGTTGCCTGGGGAAAGGCTACTCAAAAAGAGATTGAGAAACAGA
AGGTGCACCTGAAGAGTATCACAGAGGTAGGAGAGGCCTTGAAAACAGTTTTGGGCAAGAAGGAGACGTT
GGTGGAAGATAAACTCAGTCTTCTGAATAGTAACTGGATAGCTGTCACCTCCCGAGCAGAAGAGTGGTTA
AATCTTTTGTTGGAATACCAGAAACACATGGAAACTTTTGACCAGAATGTGGACCACATCACAAAGTGGA
TCATTCAGGCTGACACACTTTTGGATGAATCAGAGAAAAAGAAACCCCAGCAAAAAGAAGACGTGCTTAA
GCGTTTAAAGGCAGAACTGAATGACATACGCCCAAAGGTGGACTCTACACGTGACCAAGCAGCAAACTTG
ATGGCAAACCGCGGTGACCACTGCAGGAAATTAGTAGAGCCCCAAATCTCAGAGCTCAACCATCGATTTG
CAGCCATTTCACACAGAATTAAGACTGGAAAGGCCTCCATTCCTTTGAAGGAATTGGAGCAGTTTAACTC
AGATATACAAAAATTGCTTGAACCACTGGAGGCTGAAATTCAGCAGGGGGTGAATCTGAAAGAGGAAGAC
TTCAATAAAGATATGAATGAAGACAATGAGGGTACTGTAAAAGAATTGTTGCAAAGAGGAGACAACTTAC
AACAAAGAATCACAGATGAGAGAAAGCGAGAGGAAATAAAGATAAAACAGCAGCTGTTACAGACAAAACA
TAATGCTCTCAAGGATTTGAGGTCTCAAAGAAGAAAAAAGGCTCTAGAAATTTCTCATCAGTGGTATCAG
TACAAGAGGCAGGCTGATGATCTCCTGAAATGCTTGGATGACATTGAAAAAAAATTAGCCAGCCTACCTG
AGCCCAGAGATGAAAGGAAAATAAAGGAAATTGATCGGGAATTGCAGAAGAAGAAAGAGGAGCTGAATGC
AGTGCGTAGGCAAGCTGAGGGCTTGTCTGAGGATGGGGCCGCAATGGCAGTGGAGCCAACTCAGATCCAG
CTCAGCAAGCGCTGGCGGGAAATTGAGAGCAAATTTGCTCAGTTTCGAAGACTCAACTTTGCACAAATTC
ACACTGTCCGTGAAGAAACGATGATGGTGATGACTGAAGACATGCCTTTGGAAATTTCTTATGTGCCTTC
TACTTATTTGACTGAAATCACTCATGTCTCACAAGCCCTATTAGAAGTGGAACAACTTCTCAATGCTCCT
GACCTCTGTGCTAAGGACTTTGAAGATCTCTTTAAGCAAGAGGAGTCTCTGAAGAATATAAAAGATAGTC
TACAACAAAGCTCAGGTCGGATTGACATTATTCATAGCAAGAAGACAGCAGCATTGCAAAGTGCAACGCC
TGTGGAAAGGGTGAAGCTACAGGAAGCTCTCTCCCAGCTTGATTTCCAATGGGAAAAAGTTAACAAAATG
TACAAGGACCGACAAGGGCGATTTGACAGATCTGTTGAGAAATGGCGGCGTTTTCATTATGATATAAAGA
TATTTAATCAGTGGCTAACAGAAGCTGAACAGTTTCTCAGAAAGACACAAATTCCTGAGAATTGGGAACA
TGCTAAATACAAATGGTATCTTAAGGAACTCCAGGATGGCATTGGGCAGCGGCAAACTGTTGTCAGAACA
TTGAATGCAACTGGGGAAGAAATAATTCAGCAATCCTCAAAAACAGATGCCAGTATTCTACAGGAAAAAT
TGGGAAGCCTGAATCTGCGGTGGCAGGAGGTCTGCAAACAGCTGTCAGACAGAAAAAAGAGGCTAGAAGA
ACAAAAGAATATCTTGTCAGAATTTCAAAGAGATTTAAATGAATTTGTTTTATGGTTGGAGGAAGCAGAT
AACATTGCTAGTATCCCACTTGAACCTGGAAAAGAGCAGCAACTAAAAGAAAAGCTTGAGCAAGTCAAGT
TACTGGTGGAAGAGTTGCCCCTGCGCCAGGGAATTCTCAAACAATTAAATGAAACTGGAGGACCCGTGCT
TGTAAGTGCTCCCATAAGCCCAGAAGAGCAAGATAAACTTGAAAATAAGCTCAAGCAGACAAATCTCCAG
TGGATAAAGGTTTCCAGAGCTTTACCTGAGAAACAAGGAGAAATTGAAGCTCAAATAAAAGACCTTGGGC
AGCTTGAAAAAAAGCTTGAAGACCTTGAAGAGCAGTTAAATCATCTGCTGCTGTGGTTATCTCCTATTAG
GAATCAGTTGGAAATTTATAACCAACCAAACCAAGAAGGACCATTTGACGTTAAGGAAACTGAAATAGCA
GTTCAAGCTAAACAACCGGATGTGGAAGAGATTTTGTCTAAAGGGCAGCATTTGTACAAGGAAAAACCAG
CCACTCAGCCAGTGAAGAGGAAGTTAGAAGATCTGAGCTCTGAGTGGAAGGCGGTAAACCGTTTACTTCA
AGAGCTGAGGGCAAAGCAGCCTGACCTAGCTCCTGGACTGACCACTATTGGAGCCTCTCCTACTCAGACT
GTTACTCTGGTGACACAACCTGTGGTTACTAAGGAAACTGCCATCTCCAAACTAGAAATGCCATCTTCCT
TGATGTTGGAGGTACCTGCTCTGGCAGATTTCAACCGGGCTTGGACAGAACTTACCGACTGGCTTTCTCT
GCTTGATCAAGTTATAAAATCACAGAGGGTGATGGTGGGTGACCTTGAGGATATCAACGAGATGATCATC
AAGCAGAAGGCAACAATGCAGGATTTGGAACAGAGGCGTCCCCAGTTGGAAGAACTCATTACCGCTGCCC
AAAATTTGAAAAACAAGACCAGCAATCAAGAGGCTAGAACAATCATTACGGATCGAATTGAAAGAATTCA
GAATCAGTGGGATGAAGTACAAGAACACCTTCAGAACCGGAGGCAACAGTTGAATGAAATGTTAAAGGAT
TCAACACAATGGCTGGAAGCTAAGGAAGAAGCTGAGCAGGTCTTAGGACAGGCCAGAGCCAAGCTTGAGT
CATGGAAGGAGGGTCCCTATACAGTAGATGCAATCCAAAAGAAAATCACAGAAACCAAGCAGTTGGCCAA
AGACCTCCGCCAGTGGCAGACAAATGTAGATGTGGCAAATGACTTGGCCCTGAAACTTCTCCGGGATTAT
TCTGCAGATGATACCAGAAAAGTCCACATGATAACAGAGAATATCAATGCCTCTTGGAGAAGCATTCATA
AAAGGGTGAGTGAGCGAGAGGCTGCTTTGGAAGAAACTCATAGATTACTGCAACAGTTCCCCCTGGACCT
GGAAAAGTTTCTTGCCTGGCTTACAGAAGCTGAAACAACTGCCAATGTCCTACAGGATGCTACCCGTAAG
GAAAGGCTCCTAGAAGACTCCAAGGGAGTAAAAGAGCTGATGAAACAATGGCAAGACCTCCAAGGTGAAA
TTGAAGCTCACACAGATGTTTATCACAACCTGGATGAAAACAGCCAAAAAATCCTGAGATCCCTGGAAGG
TTCCGATGATGCAGTCCTGTTACAAAGACGTTTGGATAACATGAACTTCAAGTGGAGTGAACTTCGGAAA
AAGTCTCTCAACATTAGGTCCCATTTGGAAGCCAGTTCTGACCAGTGGAAGCGTCTGCACCTTTCTCTGC
AGGAACTTCTGGTGTGGCTACAGCTGAAAGATGATGAATTAAGCCGGCAGGCACCTATTGGAGGCGACTT
TCCAGCAGTTCAGAAGCAGAACGATGTACATAGGGCCTTCAAGAGGGAATTGAAAACTAAAGAACCTGTA
ATCATGAGTACTCTTGAGACTGTACGAATATTTCTGACAGAGCAGCCTTTGGAAGGACTAGAGAAACTCT
ACCAGGAGCCCAGAGAGCTGCCTCCTGAGGAGAGAGCCCAGAATGTCACTCGGCTTCTACGAAAGCAGGC
TGAGGAGGTCAATACTGAGTGGGAAAAATTGAACCTGCACTCCGCTGACTGGCAGAGAAAAATAGATGAG
ACCCTTGAAAGACTCCGGGAACTTCAAGAGGCCACGGATGAGCTGGACCTCAAGCTGCGCCAAGCTGAGG
TGATCAAGGGATCCTGGCAGCCCGTGGGCGATCTCCTCATTGACTCTCTCCAAGATCACCTCGAGAAAGT
CAAGGCACTTCGAGGAGAAATTGCGCCTCTGAAAGAGAACGTGAGCCACGTCAATGACCTTGCTCGCCAG
CTTACCACTTTGGGCATTCAGCTCTCACCGTATAACCTCAGCACTCTGGAAGACCTGAACACCAGATGGA
AGCTTCTGCAGGTGGCCGTCGAGGACCGAGTCAGGCAGCTGCATGAAGCCCACAGGGACTTTGGTCCAGC
ATCTCAGCACTTTCTTTCCACGTCTGTCCAGGGTCCCTGGGAGAGAGCCATCTCGCCAAACAAAGTGCCC
TACTATATCAACCACGAGACTCAAACAACTTGCTGGGACCATCCCAAAATGACAGAGCTCTACCAGTCTT
TAGCTGACCTGAATAATGTCAGATTCTCAGCTTATAGGACTGCCATGAAACTCCGAAGACTGCAGAAGGC
CCTTTGCTTGGATCTCTTGAGCCTGTCAGCTGCATGTGATGCCTTGGACCAGCACAACCTCAAGCAAAAT
GACCAGCCCATGGATATCCTGCAGATTATTAATTGTTTGACCACTATTTATGACCGCCTGGAGCAAGAGC
ACAACAATTTGGTCAACGTCCCTCTCTGCGTGGATATGTGTCTGAACTGGCTGCTGAATGTTTATGATAC
GGGACGAACAGGGAGGATCCGTGTCCTGTCTTTTAAAACTGGCATCATTTCCCTGTGTAAAGCACATTTG
GAAGACAAGTACAGATACCTTTTCAAGCAAGTGGCAAGTTCAACAGGATTTTGTGACCAGCGCAGGCTGG
GCCTCCTTCTGCATGATTCTATCCAAATTCCAAGACAGTTGGGTGAAGTTGCATCCTTTGGGGGCAGTAA
CATTGAGCCAAGTGTCCGGAGCTGCTTCCAATTTGCTAATAATAAGCCAGAGATCGAAGCGGCCCTCTTC
CTAGACTGGATGAGACTGGAACCCCAGTCCATGGTGTGGCTGCCCGTCCTGCACAGAGTGGCTGCTGCAG
AAACTGCCAAGCATCAGGCCAAATGTAACATCTGCAAAGAGTGTCCAATCATTGGATTCAGGTACAGGAG
TCTAAAGCACTTTAATTATGACATCTGCCAAAGCTGCTTTTTTTCTGGTCGAGTTGCAAAAGGCCATAAA
ATGCACTATCCCATGGTGGAATATTGCACTCCGACTACATCAGGAGAAGATGTTCGAGACTTTGCCAAGG
TACTAAAAAACAAATTTCGAACCAAAAGGTATTTTGCGAAGCATCCCCGAATGGGCTACCTGCCAGTGCA
GACTGTCTTAGAGGGGGACAACATGGAAACTCCCGTTACTCTGATCAACTTCTGGCCAGTAGATTCTGCG
CCTGCCTCGTCCCCTCAGCTTTCACACGATGATACTCATTCACGCATTGAACATTATGCTAGCAGGCTAG
CAGAAATGGAAAACAGCAATGGATCTTATCTAAATGATAGCATCTCTCCTAATGAGAGCATAGATGATGA
ACATTTGTTAATCCAGCATTACTGCCAAAGTTTGAACCAGGACTCCCCCCTGAGCCAGCCTCGTAGTCCT
GCCCAGATCTTGATTTCCTTAGAGAGTGAGGAAAGAGGGGAGCTAGAGAGAATCCTAGCAGATCTTGAGG
AAGAAAACAGGAATCTGCAAGCAGAATATGACCGTCTAAAGCAGCAGCACGAACATAAAGGCCTGTCCCC
ACTGCCGTCCCCTCCTGAAATGATGCCCACCTCTCCCCAGAGTCCCCGGGATGCTGAGCTCATTGCTGAG
GCCAAGCTACTGCGTCAACACAAAGGCCGCCTGGAAGCCAGGATGCAAATCCTGGAAGACCACAATAAAC
AGCTGGAGTCACAGTTACACAGGCTAAGGCAGCTGCTGGAGCAACCCCAGGCAGAGGCCAAAGTGAATGG
CACAACGGTGTCCTCTCCTTCTACCTCTCTACAGAGGTCCGACAGCAGTCAGCCTATGCTGCTCCGAGTG
GTTGGCAGTCAAACTTCGGACTCCATGGGTGAGGAAGATCTTCTCAGTCCTCCCCAGGACACAAGCACAG
GGTTAGAGGAGGTGATGGAGCAACTCAACAACTCCTTCCCTAGTTCAAGAGGAAGAAATACCCCTGGAAA
GCCAATGAGAGAGGACACAATGTAGGAAGTCTTTTCCACATGGCAGATGATTTGGGCAGAGCGATGGAGT
CCTTAGTATCAGTCATGACAGATGAAGAAGGAGCAGAATAAATGTTTTACAACTCCTGATTCCCGCATGG
TTTTTATAATATTCATACAACAAAGAGGATTAGACAGTAAGAGTTTACAAGAAATAAATCTATATTTTTG
TGAAGGGTAGTGGTATTATACTGTAGATTTCAGTAGTTTCTAAGTCTGTTATTGTTTTGTTAACAATGGC
AGGTTTTACACGTCTATGCAATTGTACAAAAAAGTTATAAGAAAACTACATGTAAAATCTTGATAGCTAA
ATAACTTGCCATTTCTTTATATGGAACGCATTTTGGGTTGTTTAAAAATTTATAACAGTTATAAAGAAAG
ATTGTAAACTAAAGTGTGCTTTATAAAAAAAAGTTGTTTATAAAAACCCCTAAAAACAAAACAAACACAC
ACACACACACATACACACACACACACAAAACTTTGAGGCAGCGCATTGTTTTGCATCCTTTTGGCGTGAT
ATCCATATGAAATTCATGGCTTTTTCTTTTTTTGCATATTAAAGATAAGACTTCCTCTACCACCACACCA
AATGACTACTACACACTGCTCATTTGAGAACTGTCAGCTGAGTGGGGCAGGCTTGAGTTTTCATTTCATA
TATCTATATGTCTATAAGTATATAAATACTATAGTTATATAGATAAAGAGATACGAATTTCTATAGACTG
ACTTTTTCCATTTTTTAAATGTTCATGTCACATCCTAATAGAAAGAAATTACTTCTAGTCAGTCATCCAG
GCTTACCTGCTTGGTCTAGAATGGATTTTTCCCGGAGCCGGAAGCCAGGAGGAAACTACACCACACTAAA
ACATTGTCTACAGCTCCAGATGTTTCTCATTTTAAACAACTTTCCACTGACAACGAAAGTAAAGTAAAGT
ATTGGATTTTTTTAAAGGGAACATGTGAATGAATACACAGGACTTATTATATCAGAGTGAGTAATCGGTT
GGTTGGTTGATTGATTGATTGATTGATACATTCAGCTTCCTGCTGCTAGCAATGCCACGATTTAGATTTA
ATGATGCTTCAGTGGAAATCAATCAGAAGGTATTCTGACCTTGTGAACATCAGAAGGTATTTTTTAACTC
CCAAGCAGTAGCAGGACGATGATAGGGCTGGAGGGCTATGGATTCCCAGCCCATCCCTGTGAAGGAGTAG
GCCACTCTTTAAGTGAAGGATTGGATGATTGTTCATAATACATAAAGTTCTCTGTAATTACAACTAAATT
ATTATGCCCTCTTCTCACAGTCAAAAGGAACTGGGTGGTTTGGTTTTTGTTGCTTTTTTAGATTTATTGT
CCCATGTGGGATGAGTTTTTAAATGCCACAAGACATAATTTAAAATAAATAAACTTTGGGAAAAGGTGTA
AAACAGTAGCCCCATCACATTTGTGATACTGACAGGTATCAACCCAGAAGCCCATGAACTGTGTTTCCAT
CCTTTGCATTTCTCTGCGAGTAGTTCCACACAGGTTTGTAAGTAAGTAAGAAAGAAGGCAAATTGATTCA
AATGTTACAAAAAAACCCTTCTTGGTGGATTAGACAGGTTAAATATATAAACAAACAAACAAAAATTGCT
CAAAAAAGAGGAGAAAAGCTCAAGAGGAAAAGCTAAGGACTGGTAGGAAAAAGCTTTACTCTTTCATGCC
ATTTTATTTCTTTTTGATTTTTAAATCATTCATTCAATAGATACCACCGTGTGACCTATAATTTTGCAAA
TCTGTTACCTCTGACATCAAGTGTAATTAGCTTTTGGAGAGTGGGCTGACATCAAGTGTAATTAGCTTTT
GGAGAGTGGGTTTTGTCCATTATTAATAATTAATTAATTAACATCAAACACGGCTTCTCATGCTATTTCT
ACCTCACTTTGGTTTTGGGGTGTTCCTGATAATTGTGCACACCTGAGTTCACAGCTTCACCACTTGTCCA
TTGCGTTATTTTCTTTTTCCTTTATAATTCTTTCTTTTTCCTTCATAATTTTCAAAAGAAAACCCAAAGC
TCTAAGGTAACAAATTACCAAATTACATGAAGATTTGGTTTTTGTCTTGCATTTTTTTCCTTTATGTGAC
GCTGGACCTTTTCTTTACCCAAGGATTTTTAAAACTCAGATTTAAAACAAGGGGTTACTTTACATCCTAC
TAAGAAGTTTAAGTAAGTAAGTTTCATTCTAAAATCAGAGGTAAATAGAGTGCATAAATAATTTTGTTTT
AATCTTTTTGTTTTTCTTTTAGACACATTAGCTCTGGAGTGAGTCTGTCATAATATTTGAACAAAAATTG
AGAGCTTTATTGCTGCATTTTAAGCATAATTAATTTGGACATTATTTCGTGTTGTGTTCTTTATAACCAC
CAAGTATTAAACTGTAAATCATAATGTAACTGAAGCATAAACATCACATGGCATGTTTTGTCATTGTTTT
CAGGTACTGAGTTCTTACTTGAGTATCATAATATATTGTGTTTTAACACCAACACTGTAACATTTACGAA
TTATTTTTTTAAACTTCAGTTTTACTGCATTTTCACAACATATCAGACTTCACCAAATATATGCCTTACT
ATTGTATTATAGTACTGCTTTACTGTGTATCTCAATAAAGCACGCAGTTATGTTACAAAAAA
SEQ ID NO: 33-[Homo sapiens] dystrophin isoform Dp427m amino acid sequence
>NP_003997.2 dystrophin isoform Dp427m sapiens
MLWWEEVEDCYEREDVQKKTFTKWVNAQFSKFGKQHIENLFSDLQDGRRLLDLLEGLTGQKLPKEKGSTR
VHALNNVNKALRVLQNNNVDLVNIGSTDIVDGNHKLTLGLIWNIILHWQVKNVMKNIMAGLQQTNSEKIL
LSWVRQSTRNYPQVNVINFTTSWSDGLALNALIHSHRPDLFDWNSVVCQQSATQRLEHAFNIARYQLGIE
KLLDPEDVDTTYPDKKSILMYITSLFQVLPQQVSIEAIQEVEMLPRPPKVTKEEHFQLHHQMHYSQQITV
SLAQGYERTSSPKPRFKSYAYTQAAYVTTSDPTRSPFPSQHLEAPEDKSFGSSLMESEVNLDRYQTALEE
VLSWLLSAEDTLQAQGEISNDVEVVKDQFHTHEGYMMDLTAHQGRVGNILQLGSKLIGTGKLSEDEETEV
QEQMNLLNSRWECLRVASMEKQSNLHRVLMDLQNQKLKELNDWLTKTEERTRKMEEEPLGPDLEDLKRQV
QQHKVLQEDLEQEQVRVNSLTHMVVVVDESSGDHATAALEEQLKVLGDRWANICRWTEDRWVLLQDILLK
WQRLTEEQCLFSAWLSEKEDAVNKIHTTGEKDQNEMLSSLQKLAVLKADLEKKKQSMGKLYSLKQDLLST
LKNKSVTQKTEAWLDNFARCWDNLVQKLEKSTAQISQAVTTTQPSLTQTTVMETVTTVTTREQILVKHAQ
EELPPPPPQKKRQITVDSEIRKRLDVDITELHSWITRSEAVLQSPEFAIFRKEGNFSDLKEKVNAIEREK
AEKFRKLQDASRSAQALVEQMVNEGVNADSIKQASEQLNSRWIEFCQLLSERLNWLEYQNNIIAFYNQLQ
QLEQMTTTAENWLKIQPTTPSEPTAIKSQLKICKDEVNRLSDLQPQIERLKIQSIALKEKGQGPMFLDAD
EVAFTNHFKQVFSDVQAREKELQTIFDTLPPMRYQETMSAIRTWVQQSETKLSIPQLSVTDYEIMEQRLG
ELQALQSSLQEQQSGLYYLSTTVKEMSKKAPSEISRKYQSEFEEIEGRWKKLSSQLVEHCQKLEEQMNKL
RKIQNHIQTLKKWMAEVDVFLKEEWPALGDSEILKKQLKQCRLLVSDIQTIQPSLNSVNEGGQKIKNEAE
PEFASRLETELKELNTQWDHMCQQVYARKEALKGGLEKTVSLQKDLSEMHEWMTQAEEEYLERDFEYKTP
DELQKAVEEMKRAKEEAQQKEAKVKLLTESVNSVIAQAPPVAQEALKKELETLTTNYQWLCTRLNGKCKT
LEEVWACWHELLSYLEKANKWLNEVEFKLKTTENIPGGAEEISEVLDSLENLMRHSEDNPNQIRILAQTL
TDGGVMDELINEELETENSRWRELHEEAVRRQKLLEQSIQSAQETEKSLHLIQESLTFIDKQLAAYIADK
VDAAQMPQEAQKIQSDLTSHEISLEEMKKHNQGKEAAQRVLSQIDVAQKKLQDVSMKFRLFQKPANFEQR
LQESKMILDEVKMHLPALETKSVEQEVVQSQLNHCVNLYKSLSEVKSEVEMVIKTGRQIVQKKQTENPKE
LDERVTALKLHYNELGAKVTERKQQLEKCLKLSRKMRKEMNVLTEWLAATDMELTKRSAVEGMPSNLDSE
VAWGKATQKEIEKQKVHLKSITEVGEALKTVLGKKETLVEDKLSLLNSNWIAVTSRAEEWLNLLLEYQKH
METFDQNVDHITKWIIQADTLLDESEKKKPQQKEDVLKRLKAELNDIRPKVDSTRDQAANLMANRGDHCR
KLVEPQISELNHRFAAISHRIKTGKASIPLKELEQENSDIQKLLEPLEAEIQQGVNLKEEDFNKDMNEDN
EGTVKELLQRGDNLQQRITDERKREEIKIKQQLLQTKHNALKDLRSQRRKKALEISHQWYQYKRQADDLL
KCLDDIEKKLASLPEPRDERKIKEIDRELQKKKEELNAVRRQAEGLSEDGAAMAVEPTQIQLSKRWREIE
SKFAQFRRLNFAQIHTVREETMMVMTEDMPLEISYVPSTYLTEITHVSQALLEVEQLLNAPDLCAKDFED
LFKQEESLKNIKDSLQQSSGRIDIIHSKKTAALQSATPVERVKLQEALSQLDFQWEKVNKMYKDRQGRED
RSVEKWRRFHYDIKIFNQWLTEAEQFLRKTQIPENWEHAKYKWYLKELQDGIGQRQTVVRTLNATGEEII
QQSSKTDASILQEKLGSLNLRWQEVCKQLSDRKKRLEEQKNILSEFQRDLNEFVLWLEEADNIASIPLEP
GKEQQLKEKLEQVKLLVEELPLRQGILKQLNETGGPVLVSAPISPEEQDKLENKLKQTNLQWIKVSRALP
EKQGEIEAQIKDLGQLEKKLEDLEEQLNHLLLWLSPIRNQLEIYNQPNQEGPFDVKETEIAVQAKQPDVE
EILSKGQHLYKEKPATQPVKRKLEDLSSEWKAVNRLLQELRAKQPDLAPGLTTIGASPTQTVTLVTQPVV
TKETAISKLEMPSSLMLEVPALADFNRAWTELTDWLSLLDQVIKSQRVMVGDLEDINEMIIKQKATMQDL
EQRRPQLEELITAAQNLKNKTSNQEARTIITDRIERIQNQWDEVQEHLQNRRQQLNEMLKDSTQWLEAKE
EAEQVLGQARAKLESWKEGPYTVDAIQKKITETKQLAKDLRQWQTNVDVANDLALKLLRDYSADDTRKVH
MITENINASWRSIHKRVSEREAALEETHRLLQQFPLDLEKFLAWLTEAETTANVLQDATRKERLLEDSKG
VKELMKQWQDLQGEIEAHTDVYHNLDENSQKILRSLEGSDDAVLLQRRLDNMNFKWSELRKKSLNIRSHL
EASSDQWKRLHLSLQELLVWLQLKDDELSRQAPIGGDFPAVQKQNDVHRAFKRELKTKEPVIMSTLETVR
IFLTEQPLEGLEKLYQEPRELPPEERAQNVTRLLRKQAEEVNTEWEKLNLHSADWQRKIDETLERLRELQ
EATDELDLKLRQAEVIKGSWQPVGDLLIDSLQDHLEKVKALRGEIAPLKENVSHVNDLARQLTTLGIQLS
PYNLSTLEDLNTRWKLLQVAVEDRVRQLHEAHRDFGPASQHFLSTSVQGPWERAISPNKVPYYINHETQT
TCWDHPKMTELYQSLADLNNVRFSAYRTAMKLRRLQKALCLDLLSLSAACDALDQHNLKQNDQPMDILQI
INCLTTIYDRLEQEHNNLVNVPLCVDMCLNWLLNVYDTGRTGRIRVLSFKTGIISLCKAHLEDKYRYLFK
QVASSTGFCDQRRLGLLLHDSIQIPRQLGEVASFGGSNIEPSVRSCFQFANNKPEIEAALFLDWMRLEPQ
SMVWLPVLHRVAAAETAKHQAKCNICKECPIIGFRYRSLKHFNYDICQSCFFSGRVAKGHKMHYPMVEYC
TPTTSGEDVRDFAKVLKNKFRTKRYFAKHPRMGYLPVQTVLEGDNMETPVTLINFWPVDSAPASSPQLSH
DDTHSRIEHYASRLAEMENSNGSYLNDSISPNESIDDEHLLIQHYCQSLNQDSPLSQPRSPAQILISLES
EERGELERILADLEEENRNLQAEYDRLKQQHEHKGLSPLPSPPEMMPTSPQSPRDAELIAEAKLLRQHKG
RLEARMQILEDHNKQLESQLHRLRQLLEQPQAEAKVNGTTVSSPSTSLQRSDSSQPMLLRVVGSQTSDSM
GEEDLLSPPQDTSTGLEEVMEQLNNSFPSSRGRNTPGKPMREDTM
SEQ ID NO: 34-micro-dystrophin (uDys5, SEQ ID NO: 4 in U.S. Pat. No. 10,479,821 B2)
Met Leu Trp Trp Glu Glu Val Glu Asp Cys Tyr Glu Arg Glu Asp Val
1 5 10 15
Gln Lys Lys Thr Phe Thr Lys Trp Val Asn Ala Gln Phe Ser Lys Phe
                        20 25 30
Gly Lys Gln His Ile Glu Asn Leu Phe Ser Asp Leu Gln Asp Gly Arg
                35 40 45
Arg Leu Leu Asp Leu Leu Glu Gly Leu Thr Gly Gln Lys Leu Pro Lys
        50 55 60
Glu Lys Gly Ser Thr Arg Val His Ala Leu Asn Asn Val Asn Lys Ala
65 70 75 80
Leu Arg Val Leu Gln Asn Asn Asn Val Asp Leu Val Asn Ile Gly Ser
                                85 90 95
Thr Asp Ile Val Asp Gly Asn His Lys Leu Thr Leu Gly Leu Ile Trp
                        100 105 110
Asn Ile Ile Leu His Trp Gln Val Lys Asn Val Met Lys Asn Ile Met
                115 120 125
Ala Gly Leu Gln Gln Thr Asn Ser Glu Lys Ile Leu Leu Ser Trp Val
        130 135 140
Arg Gln Ser Thr Arg Asn Tyr Pro Gln Val Asn Val Ile Asn Phe Thr
145 150 155 160
Thr Ser Trp Ser Asp Gly Leu Ala Leu Asn Ala Leu Ile His Ser His
                                165 170 175
Arg Pro Asp Leu Phe Asp Trp Asn Ser Val Val Cys Gln Gln Ser Ala
                        180 165 190
Thr Gln Arg Leu Glu His Ala Phe Asn Ile Ala Arg Tyr Gln Leu Gly
                195 200 205
Ile Glu Lys Leu Leu Asp Pro Glu Asp Val Asp Thr Thr Tyr Pro Asp
        210 215 220
Lys Lys Ser Ile Leu Met Tyr Ile Thr Ser Leu Phe Gln Val Leu Pro
225 230 235 240
Gln Gln Val Ser Ile Glu Ala Ile Gln Glu Val Glu Met Leu Pro Arg
                                245 250 255
Pro Pro Lys Val Thr Lys Glu Glu His Phe Gln Leu His His Gln Met
                        260 265 270
His Tyr Ser Gln Gln Ile Thr Val Ser Leu Ala Gln Gly Tyr Glu Arg
                275 280 285
Thr Ser Ser Pro Lys Pro Arg Phe Lys Ser Tyr Ala Tyr Thr Gln Ala
        290 295 300
Ala Tyr Val Thr Thr Ser Asp Pro Thr Arg Ser Pro Phe Pro Ser Gln
305 310 315 320
His Leu Glu Ala Pro Glu Asp Lys Ser Phe Gly Ser Ser Leu Met Glu
                                325 330 335
Ser Glu Val Asn Leu Asp Arg Tyr Gln Thr Ala Leu Glu Glu Val Leu
                        340 345 350
Ser Trp Leu Leu Ser Ala Glu Asp Thr Leu Gln Ala Gln Gly Glu Ile
                355 360 365
Ser Asn Asp Val Glu Val Val Lys Asp Gln Phe His Thr His Glu Gly
        370 375 380
Tyr Met Met Asp Leu Thr Ala His Gln Gly Arg Val Gly Asn Ile Leu
365 390 395 400
Gln Leu Gly Ser Lys Leu Ile Gly Thr Gly Lys Leu Ser Glu Asp Glu
                                405 410 415
Glu Thr Glu Val Gln Glu Gln Met Asn Leu Leu Asn Ser Arg Trp Glu
                        420 425 430
Cys Leu Arg Val Ala Ser Met Glu Lys Gln Ser Asn Leu His Ser Tyr
                435 440 445
Val Pro Ser Thr Tyr Leu Thr Glu Ile Thr His Val Ser Gln Ala Leu
        450 455 460
Leu Glu Val Glu Gln Leu Leu Asn Ala Pro Asp Leu Cys Ala Lys Asp
465 470 475 480
Phe Glu Asp Leu Phe Lys Gln Glu Glu Ser Leu Lys Asn Ile Lys Asp
                                465 490 495
Ser Leu Gln Gln Ser Ser Gly Arg Ile Asp Ile Ile His Ser Lys Lys
                        500 505 510
Thr Ala Ala Leu Gln Ser Ala Thr Pro Val Glu Arg Val Lys Leu Gln
                515 520 525
Glu Ala Leu Ser Gln Leu Asp Phe Gln Trp Glu Lys Val Asn Lys Met
        530 535 540
Tyr Lys Asp Arg Gln Gly Arg Phe Asp Arg Ser Val Glu Lys Trp Arg
545 550 555 560
Arg Phe His Tyr Asp Ile Lys Ile Phe Asn Gln Trp Leu Thr Glu Ala
                                565 570 575
Glu Gln Phe Leu Arg Lys Thr Gln Ile Pro Glu Asn Trp Glu His Ala
                        560 565 590
Lys Tyr Lys Trp Tyr Leu Lys Glu Leu Gln Asp Gly Ile Gly Gln Arg
                595 600 605
Gln Thr Val Val Arg Thr Leu Asn Ala Thr Gly Glu Glu Ile Ile Gln
        610 615 620
Gln Ser Ser Lys Thr Asp Ala Ser Ile Leu Gln Glu Lys Leu Gly Ser
625 630 635 640
Leu Asn Leu Arg Trp Gln Glu Val Cys Lys Gln Leu Ser Asp Arg Lys
                                645 650 655
Lys Arg Leu Glu Glu Gln Ser Asp Gln Trp Lys Arg Leu His Leu Ser
                        660 665 670
Leu Gln Glu Leu Leu Val Trp Leu Gln Leu Lys Asp Asp Glu Leu Ser
                  675 680 685
Arg Gln Ala Pro Ile Gly Gly Asp Phe Pro Ala Val Gln Lys Gln Asn
        690 695 700
Asp Val His Arg Ala Phe Lys Arg Glu Leu Lys Thr Lys Glu Pro Val
705 710 715 720
Ile Met Ser Thr Leu Glu Thr Val Arg Ile Phe Leu Thr Glu Gln Pro
                                725 730 735
Leu Glu Gly Leu Glu Lys Leu Tyr Gln Glu Pro Arg Glu Leu Pro Pro
                        740 745 750
Glu Glu Arg Ala Gln Asn Val Thr Arg Leu Leu Arg Lys Gln Ala Glu
                755 760 765
Glu Val Asn Thr Glu Trp Glu Lys Leu Asn Leu His Ser Ala Asp Trp
        770 775 780
Gln Arg Lys Ile Asp Glu Thr Leu Glu Arg Leu Gln Glu Leu Gln Glu
785 790 795 800
Ala Thr Asp Glu Leu Asp Leu Lys Leu Arg Gln Ala Glu Val Ile Lys
                                805 810 815
Gly Ser Trp Gln Pro Val Gly Asp Leu Leu Ile Asp Ser Leu Gln Asp
                        820 825 830
His Leu Glu Lys Val Lys Ala Leu Arg Gly Glu Ile Ala Pro Leu Lys
                835 840 845
Glu Asn Val Ser His Val Asn Asp Leu Ala Arg Gln Leu Thr Thr Leu
        850 855 860
Gly Ile Gln Leu Ser Pro Tyr Asn Leu Ser Thr Leu Glu Asp Leu Asn
865 870 875 880
Thr Arg Trp Lys Leu Leu Gln Val Ala Val Glu Asp Arg Val Arg Gln
                                885 890 895
Leu His Glu Ala His Arg Asp Phe Gly Pro Ala Ser Gln His Phe Leu
                        900 905 910
Ser Thr Ser Val Gln Gly Pro Trp Glu Arg Ala Ile Ser Pro Asn Lys
                915 920 925
Val Pro Tyr Tyr Ile Asn His Glu Thr Gln Thr Thr Cys Trp Asp His
        930 935 940
Pro Lys Met Thr Glu Leu Tyr Gln Ser Leu Ala Asp Leu Asn Asn Val
945 950 955 960
Arg Phe Ser Ala Tyr Arg Thr Ala Met Lys Leu Arg Arg Leu Gln Lys
                                965 970 975
Ala Leu Cys Leu Asp Leu Leu Ser Leu Ser Ala Ala Cys Asp Ala Leu
                        980 985 990
Asp Gln His Asn Leu Lys Gln Asn Asp Gln Pro Met Asp Ile Leu Gln
                995 1000 1005
Ile Ile Asn Cys Leu Thr Thr Ile Tyr Asp Arg Leu Glu Gln Glu
        1010 1015 1020
His Asn Asn Leu Val Asn Val Pro Leu Cys Val Asp Met Cys Leu
        1025 1030 1035
Asn Trp Leu Leu Asn Val Tyr Asp Thr Gly Arg Thr Gly Arg Ile
        1040 1045 1050
Arg Val Leu Ser Phe Lys Thr Gly Ile Ile Ser Leu Cys Lys Ala
        1055 1060 1065
His Leu Glu Asp Lys Tyr Arg Tyr Leu Phe Lys Gln Val Ala Ser
        1070 1075 1080
Ser Thr Gly Phe Cys Asp Gln Arg Arg Leu Gly Leu Leu Leu His
        1085 1090 1095
Asp Ser Ile Gln Ile Pro Arg Gln Leu Gly Glu Val Ala Ser Phe
        1100 1105 1110
Gly Gly Ser Asn Ile Glu Pro Ser Val Arg Ser Cys Phe Gln Phe
        1115 1120 1125
Ala Asn Asn Lys Pro Glu Ile Glu Ala Ala Leu Phe Leu Asp Trp
        1130 1135 1140
Met Arg Leu Glu Pro Gln Ser Met Val Trp Leu Pro Val Leu His
        1145 1150 1155
Arg Val Ala Ala Ala Glu Thr Ala Lys His Gln Ala Lys Cys Asn
        1160 1165 1170
Ile Cys Lys Glu Cys Pro Ile Ile Gly Phe Arg Tyr Arg Ser Leu
        1175 1180 1185
Lys His Phe Asn Tyr Asp Ile Cys Gln Ser Cys Phe Phe Ser Gly
        1190 1195 1200
Arg Val Ala Lys Gly His Lys Met His Tyr Pro Met Val Glu Tyr
        1205 1210 1215
Cys Thr Pro Thr Thr Ser Gly Glu Asp Val Arg Asp Phe Ala Lys
        1220 1225 1230
Val Leu Lys Asn Lys Phe Arg Thr Lys Arg Tyr Phe Ala Lys His
        1235 1240 1245
Pro Arg Met Gly Tyr Leu Pro Val Gln Thr Val Leu Glu Gly Asp
        1250 1255 1260
Asn Met Glu Thr Asp Thr Met
        1265 1270
```

The application's sequence listing, which the Patent Office published only in electronic form, follows.

SEQUENCE LISTING (43 sequences)

SEQ ID NO: 1 - DNA, 114836 bp, Homo sapiens
taaatctacaatagctatgagccaaccccctgcttttgcctgtttcaggggcctggtacccttcctaacttctgaccctcagcctctttctttctaggtcctatggtggtctccttttccattcatgactcttcccctttggctagcagacgtttaaacatttcccttaggtctctcctctgcttttgctgaggttctcaggcctctaggaaggcagaaggaggattcaggattggcagagagagcacctccatatctacctttttgtctgtagagcaggaggagtggcatctggaattgattcatggtcttagcaaccaccagctccttaaagggtctcaagttcctagactagcctgtgtgtgtgcatgtccagtgtgcggtggcatgtctccataactcagccttgcaaagaagcctcttgcgaccggcccgtacataggcctttcagcttggcaggcctcatcatcttcattcccacaataatttctacatttccaagtgctttgccagcatatttgatcctccaaacagtcttgtaagataaattgaattggtattatcttcattaggccaaagttaaggactagcaagtttagatgacttgacttgtccaagatcacacaggagtccagacctcttctgaaccactgctctttaaaggccaacatcctgtctttctatgcctccctacattctccgtcagcagagttctgaaagagaccccacccttcctgccgcaccacagactttggtttgaactctgcaatacctatctatgacctcctttgaatcctatgagatggttagaagaggcagcatcctggccttttggggtgggtgaaggattatttgcaaggctgttctaaccttctcatctccagcctgggtcaggtccactgactgcatgtgccctgttccttggggcctggcccagactggataatatcctaaggtgtgacaggagtaagtggggaaggaaggcatggaaaatggtgactcggagcaggctgtaggttctgtgttagcttgagtcccaggaaatacagccagctatgagaaggcagagattttattgaggatgccgcctgtggaatttaagcctatggctgcaccagttcagagccagagcattcaccactggtggggcccaggtattggaaaaccatttgccagacagatgatggtatgatgacatttgtttttgtttcttatctgtttcttccctccctatcacttttccctttcttgtctttctctcttggcccttctttctacctgcttatccttttgcttttcttcctctacaattctactctccttttcctgtctcttttccaatctatcctcattccctcctcctgcctcctctcttatcctatacttatggctgctcaacttctgtctattcctctttcctctctccttcccacctgcctgttcatcctatttctctctcctgccgctctatccccattttcctaccctgtccttgtcttctcgtgttgtccctctctcctcttcgcctttcccctatcacctcatccaatatatgtccctttcttcctctctgccccatgtcttgcagggatttgacccattccgattcggagtcctccctccacatgagtgaccgccagcgtgtggcccccaaacctcctcagatgagccgtgctgcagacgaggctctcaatgccatgacttccaatggcagccaccggctgatcgagggggtccacccagggtctctggtggagaaactgcctgacagccctgccctggccaagaaggcattactggcgctgaaccatgggctggacaaggcccacagcctgatggagctgagcccctcagccccacctggtggctctccacatttggattcttcccgttctcacagccccagctccccagacccagacacaccatctccagttggggacagccgagccctgcaagccagccgaaacacacgcattccccacctggctggcaagaaggctgtggctgaggaggataatggctctattggcgaggaaacagactccagcccaggccggaagaagtttcccctcaaaatctttaagaagcctcttaagaagtaggcaggatggggtggcagtaaagggacagcttgtccttccctgggtgttctgtctctccttccctcccttccttcaagataactggccccaagagtggggcatgggaagggctggtccaggggtctgggcactgtacatacctgccccctcatccttgggtccttcattattatttattaactgaccaccatggcctgcctgccctgcctccgtcccaaccatgggctgctgctgtcactccctctccacttcagtgcatgtcttagttgctgttccctcagctcccagctccacctctggggttcagcttctgtctctgctgtcccagttttgaggtttggtttcttgtttctgtctcttgctttcgggctcctccctcccaccactccccaacttcccctagcagttgcagggaagataggacgagtagcttctgacatgtgtgcctcagatctgttccaccccactcacagtggttctgtttgctccagactggggctagggcctaatctttgaagtttgttctttggtattgatgtgggtcagaaggagcctcatcctaatctcactcaggcctccagggatccatgggggagtgaaaccaattctcagagaacaacccaccagagacttttaaagagaggccaggcttgggaatgggttgggagaggcatctgttcattggagcatgagtggatgccagaactgtaggttataaggcagtcactttttctctctactcccacccacacctgcctccctcttacccctgctcccccacactgcaggaggatttgtctctaagaggtgctgccccaaagctccccaagcatcaatactcctagggctcaggacaagtggctcccctggccaggagagccacagccatgatacagggctcttatggagccctggagttgttgggcaaggatgctgtcattttttgaaccaaaagacaaacaggttaaaaggaaaaaaagtaatctgaatttcccaagtgcctacgctgcatattccccttgttagatcccattttcatgttactttgtagccttggccagaggctcaaaaaggacacaaccagtttggggaaggggtggctaaggaagatggtataggtgaaggcggctgtgtgaccactttcccccacccttcccaccctctagacaactctctcccttacctgtttttgctatggctgtaaaggtatttttcctctgccccactccctgccatacctttatcctgggatcctattttgggcctggggtgggtatacctggggctggtcttaggagggtgctaggctgcagactgccttgtactccctggacaccctcaaatggggttttctgtgttatttcataaaattctttgaagtccaataaagcatgtaggagattttaaccactgctggctttgactctcattgtgttctctgtgctgtggcatgatgggataaagagacaatctttcctttgcccagggaaaatgaaacttgaatgcacatgcccagaagctctgtgggcagggttaccagataaatgcaggatgaccagttaaatgtgaatttcagataaacagtttttaaagtataattttctctcatgcagtatctgggacacatttttatttgctaaattgggaaaccctatgtctgggtaaacttgaccctatctatcctataacttcacttacgacttttaaaaaacatatctatttaatttttctttctttttttttgttttttttgagacggcgtctcactctcttgcctaggctagggtgcaatggcgcgatcttggctcactgcaacctctgcctccagcgttcaagcgattcttctgcctcagcctcctgagtagctgggattacaggcgcgtgctaccatgcctggctactttttgtatttttagcagcgggggggtttcaccacgttggttaggctggtctcgaactcctgacctcgtgatctgcccgccttggcctcccatagtgctgggattacaggagtgaagcaccgcgctggcctactttttctattttttgtagaaatggggtctcactatgttgcccaggcttatctcaacacctggcctcacatgatgctcccgccttagcctcccaaaatgctgcaattacaggctcacttacgactttccatgatttttgaaattacttcacagggagcctgggcagcttctggagggcagtgagaaaccaacgaaaaggctttagggaaaagatgccacagatgaaatttcataaagatcgctttgggtagcccaaatcagaagcttctacaccagccttacatattacggttctcatctattcttattctccactctaagtcaccaagtccatcctacctccacaaggcaaataccctgtctctgccaccatccactgaagaaccctaaaagcaaatgggtactgaccctgccctgcttaaaattctctcagggctctgatttgcgtcaggataaaatccaaacgccatcggccttgcgcggttttcttccagttccagagtgtcagtcctctggccgatctaaaagccctggggctccaagctgcccacggctgtggagcctgggctggagcccacagcggacggcagtgttagtattattataataaatgtcagagcaagaaaaacgttcccgccggttaggttttgttatttcaaaaataaattaaccgcctttcctccggcggagacgcgcaggtgagagggcggcgcctgacccagcgggctctaggtgctacgccagggccccgagggtcccgaactcggcttgcccacacaaaacatggtagcaggagagcagcatttccgccgggcatgtccatatccaatggggcccatgggagaggcgtagtcttctgggtcttgcccagactcaacatggcggctacacgtcgcctgtcagtctgtgaagcctaccccgggcgtgggccgcagcgtcgagtaacgtcattcgaaccccgtcgcgcccctttgtgcgtcacgggtggcgggcgcgggaaggggatttggattgttgcgcctctgctctgaagaaagtgctgtctggctccaactccagttctttcccctgagcagcgcctggaacctaacccttcccactctgtcaccttctcgatcccgccggcgctttagagccgcagtccagtcttggatccttcagagcctcagccactagctgcgatgcatgtgatcaagcgaggtgagggggggacgaggtgggcgagaaggaaggtgaggggatgcgggctgccgccgccggagctgatgcccagaccgcccgcccgccttcgctgcttcccgcctttcccgcatttcccgccgcggccttccgccctgtcagcccgctcggccttctgtcttcagtcagcctgccccgaacctccttcgggccttcaggctgcgccccctcggctttgtcatcctgccgcctttcaaaaggataacacttaccccgtatcgagtagtgactgcgtacgccgagcacttgccaggcactattttattcctccctgcaagcctctgagagatgattagcttattacagatgaggaaactgacgctcagagcgaggtgtcgccgactgacccaaagtcacccataggtgacaatacggtttgatttgaaaaccgtggggttggtgagctgtcttaggcacagggtcggggggcagctaggaaagaaggagggggcctctctaccctccgtaggcacttgtcagtttactgatctcttttgtggggtgaggataggagtgtggcgtggaaaaaacagatcccagacagacagcaccctcgagttcctttcccttcatgggaagagatgctgaatcagagaagggtggctgagacatcttctgacaagatggggactgggaagagtcaggaactcgtattctttctcaacagttctttttcattagacttgccaagtgcccgctttgtgcccagccctttgcttggctttgtgagattgtaggaggagacagtccctgccttgggaacaggcttcatcgggttggaaaaacaagagcaacatacttttaacaaccgcatgagatacgtatgaacaagttttgagttgaacctacttgcctttgttaaagcaatacaatgatttcaaaattgtaggcacttagtaaatactggttaatcgactggttgtttctattttgtcctctaggctgtgaacatttcaaagatggagacttgtttgagacagagtcttgctctgtcacccaggatggaatgcagtggtgtaatcatagcttactgtaaccttgaagtcctgggctcaagcgatgctcttgcctcagcctctcaagtagctgggactataggcatgcaccaccatgagtggctaatttttaaaaatttctggtagtaaaggagtcttgctgtgtttcccagtctggccttgaattcctggcctcaaaccatcctcccttccttggcttcccaaagtgctgggaatacaagcaagatggagacttttctgttcacgtttagcacaggacctgacatgaacagattcttaaagaatgaatgaaaatagttgtatcaaaatgtaggacacgatgaatgctgtgaataagcaggtagttgatttggtttaactacagccaatgtccagattggtttaactacagacaagagttggaaaggtggacagtagtggcctttcttgtttttggtatcttgagaacatcattctgtgaattttcctagctcacattttagctgaccaaagagcaaaataacatagtgcacttttattgatccattcataagagtgagagctgagcatctatttttgtatttttatttttttacattattatttatttgtatttttttagagaaggagtctcgctatgttgcccaggcttgtcttgaactcctgggctcaagcattcttcccacttcagcctcccaaagtgcttggattacagtgctgggagccaccgcacctggcttgagcatctattttttaaatctttagatatgggagagatgtttaggatggtctatgataagtcagtaacaaagatgaattgaaaatgtatggacttagatgaccagaatgggtaaaattcaaccctgtgttgaattttgaacttttagagtctacttctaaatactttcgtttaaaaagtgctaccttggcctggcgtggcagggcatggtggctcacgcctgtaatcccagcactttgggaggctgaggtgggtggatcatttgaggtgtggagtttgagaccagctgggccaacatggtggaaccccgtctctactaaaaacacaaaagttagccggacggtagtggtttgcacctgtaatcccagctactcaggaggctgaggcaggagaatcgcttgagcctgggaggcagaggttgctgaaatcgtgccattgcactccagtctaggcgacagagtgacactctgtctcaaaaaaaaaaaaaaaaaaaaaaaccacaaagtgctagctataactagctctaaaaagcagagcttattttctcattccttcatagagcacaatttgatccagatggttcatgctgtagattctgccattgtagcattcagcaagacttaatatacaacatgtacttagatttgtttgtttctttttttttttatatttctatgtttctatattttaatgttttttaatatgcatagggtttttggttttctggactttttttgtacccccttatttttggcatgtcagtggaatagcagactaactcctacagtttttgttaattttctttgagatggggtcttgctctgtcatccaggctggagtgcagtggtgtgatctcagctcactgcagtgtctgcctcctgggttcaagagattctcctgcctcagcctcctcagtagctgggactacagatgtgtgccaccacgcctggctagtttttgttatttttaataacaagggcaactggaagttgactttgaagtacctactgaatatgctaatgtcttgctaaacactgtgagggcagtaatggagaaggcagctctatcttcaaagaacttaaaattgttagggatttaggaacaatccatatgaaaattattagatagaagagaatagtagatgagtttttttcatctgctatcttgagctatttttcctaatgggagagtatcattcctcaaggagattatggttaaaaaaataaacattgagaaccattgcagtaaatgacaaagtagctaactgagttgtaaactgttttggaatttagtgtagtattttcaaaactttggattgtaactcacagtaaaaaacaaaacattttacagacatgtgtatatatgtggatacacataaaatgatacaaaagtttacgaaataatgtctttgaaagcatccatttgcactctaatctttcttttattccagattctttccctatccctgcctccctccctcccttccttcctccctttcttcctccctcccttccttccctccctccttgcttccttccttcctttctccctcccttctttcctgccctcctccctccctcccctccctctccccctccctccgtcccttcctccttccttccttccttccttcctattccattcacagcctgctaatattattttacaactctgtggataccgtgctgttcaccgggattgcagtgatgagtaggcagacatggttccagcttccaaagatcctacaatcaattgagaaagatagacaaataaagaagtaatatgataaaatatgataaatactctgataggtaaagtataggcagtagaggccattcattcagttattcataaagcatttattcagcacctctttgtgctaggaaccgttgtaggcattagagattctgcagtgaacaaagctaaattacatttctcattgagttgacttcttggtgtgggtgggagtggtaagtgtatataagaaataagaagtaaacataataatcagttaatttcagatactgattaatgagatgatagtaaaacaggatcatgtgataaagatgaatgagaaaataaccttggattgggtagccaggaaaggcttctctgagaagccaacatttgagctgaaccctaaatagtattaagagctagtaatgtgagatctgtggcctgaacattctcggcagagggaattagaaagtttgtatcctgtggaaaaggcacgcatccttggtcttacaggattagggaagtcttcctgaagagagaagaatgaaagacagtttatagccaagaggaaatcacactagtatgctagaggattttttaattttattttttattttttgagacggagtcttgctctgttgcccaggctggagtgcagtggtgtgatcttggcttactgcaacctctgcttcccaggttcaggcaattctgcctcagcctcccgagtagctgggattacagcatacccagctaatttttttttttttttttttgtatttttagtagagatggggtttcaccatattggctagactggtctcgaactcctgacctcaggtgatccgcctgctttggcctcccaaagtgctaggaatacaggctgagccaccatgccctgctggctagaggattttaaaagaggaaaaggtcagtgtgagttaaaagtggttgaggcaggttttatggaggtgtgagatttggagggtgagtaggagttagatgtatggaaaggtggaagaggaacctttaggcagagtaaggtataagcaatgatgtggatatgggaatgggaagccctcttgggacttatatttcacagggaacagttgaagagatctggggccaaactaagaaaggctttgcttgagagaagaggataatgtaggcagtgagaagcagggattagtgatgtgataaaatcaacatctggcttgaaaaactaaccaagtggaatgacagaatagagaactgtgtgtcattggacctttagatctttagtctgcctcctattttcaagtgtgagttaagataattaccaatgcacttttttttttttgtcagtttcctgattgacttcagaacttctggcagttgtagaattttctttttgctaagttgctttccccccccactgcatgtataattgcagaacgctaatgttgctttgcagttacctgcctgcttagttatccaattgctagagcactgaggtttcagtcccagtgccagccagttaatttaccccatttcagagttaaatgctgcagatgtgagcctgatgagaaaattatcacaatggtgatcagaaagagaggggctaacatatcagtgtagaagaaaaagcaacttgttctagtgataatgggttaatagtgatgtcttattgttcatttattcttcatcaaatgtttgagaacttgccttgttctaggcactaaatttgagaatacagatgtgaatcagagggccaaataaatgtaaacatatttagcatgtttcttattggttacttcaggttgagtatcccttattcaaaatgcttgggcccagaagtgtttcggattttggatttgtttcagattttggaatattcgcattatacttactggttgggcatccctaatcagaaaatccaaaatctgaaatggtccaaggaacattttctttgaacattgtgttggcattgaaaaagttttggattttggagtgttttggattttggaattttggattaaggatactcagcctatagttacaatggattgtaggtgcacaaaagagacaaaaactaaatcagtgtgagacactaacatttattgagtgcctattgtgtatcacatactgtgatttttttttcccccataggagcagctttattttataacgaggtatagttgtaactatgccaaagttgttacaacaaaagcactttttaccttatctaattttattgtcacagtaaactgattaggcaagtaaaatagatataataattaacccctttctacaaatgaagatctgtgaaatgactgattgtgttttgtggcttgtctaaggttaaggctgtttggtggttggatatattcactattcctggtaagaataaataaaggtcggatgagctactatttgaggttaaactaagagtagtaagacttttttgtctagaaggacaaagatataatctaagtccaaaatcatgaaaaatattaggtaaaatatatagtatgtcagatggggtaagtgcaatggagaaaaagcacagaaggggaagggggataagaagagcaagggtcctatttggggcattgcaatttaaaatggaatcatcagggaaagccacattgagaaggtgatgacattgagcaaaagacctaaaggagatatatagcaagaaggccaagttgtcaaggtacaataggaaggaaggtgggagagttggaggtgaaattgggaagtgggtgcacaggacaagtggtataggattctgtggatttttttttttttttagttggagtttcattcttgttgtccaggctggaatgcaatggcgtgatctcagctcactgcaacctccgcctcctgggttcaaacaattctcctgccttagcctcccgaatagctgggattataggcccctgccaccatgcccagctaattttttgtatttttagtagagacggggtttcaccatattgatcaggctgatctcgaactcctgacctccagtgatccacacccccccccgctcccttggcctcccaaagtgctgggattacaggtgtgagccactaggcctggcctgtggattgttataacaattttgacttttattctggagatcataagccactattaggagttttgaaggaggtaatgatatgattctgagtttaacttttaaagggtaattttggctgccatgtgggatgggggaaaaatttaggaaattatccgtaaacgtctgtctgtatagaattcatactctttgaaggtgacatcagagaagacaatctcttcatgaatcttttgagggggcctcaatcttttctgtgaaatagcacttcatgttggtcaatttacatgttaattacatttgattctttgacattgtagtcttaataattgctaacatgaatttaataattgctaacatgatttgattctttagatggccgccaagaacgagtcatgtttgacaaaattacatctcgaatccagaagctttgttatggactcaatatggattttgttgatcctgtaagtaaatatggtttttatcttgggttccttctttcatgtgtttctttccatttgtctcttatccctggaccttcattcacctgatatactttggtattctggctatgcccttcgatataaaatttgaattcattgcttaaaacatttttttttccttaattttggttctgtcctgtgagttctcacttttcagagaactatgaatgtgagtaaagaggaaaatttgatattaacatttaatatcagatatttccttgagtaaattgttttattcattagtggaaaagcctaggccaggcgccgtggctcacgcctgtaatcccagcactttgggaggctgaggtgggcagatcacctgaggtcaggagttcaagaccagcctggccaacatggtgaaaccccgtctctactaaaaatgcaaaaattagccgggcctggtggtgggcgcctgtaatcccagctacttgggaggcaggagaatcacttgaacctgggaggcagaggttgcagtgagccgagatcgtgccactgcactccagcctgggcgacagagcgagactccctctcaaaaaaaaaaaaaaaagggaagcctagagtaaagcttgttttggaattgtggttatttaggtagggactggtttaaaatttgttttttgttatttatgtaaaaagatttaagtaatataaagtagatttcatggacaatatttaagtcaagaacaaactattcataaaccagttgctctgcttttctccttatcctttataacttctgtattctagactctcatcatcagttatctggactgttttctgtggtctctgcagtgtcctggacttcctctaatcttaccctcttcaaactcgtcttccacctgacttctaaaatgatcttccttaaatgagaatctctaagaactctttttttcaaatccacccatatttccgtctccttatttaggtatcttatccgcactgctaaggtatcttaggtatcttatccgtaaaacctgtgctcatctcatagctttaatcatatagtatggaaattaattatggatctttgtcctcccctagaattgaggatgggctgtgtatcttattcttgtgatatcctcagtgcttgacatgtatctaattagccacttgaccaaagtaagtttggtcaagagaaaatgattttatgtatcttgaaaatatgtttattgtaaattctcttttatattgaggacttaggcaataattagaatagtagaatgttagagttggaatgaacttaagagtccatcccatttcatctttggtttatagataagaaagttccaaagagagaggggagtgacttaagttagtgggagtgtagggagaagcacctaggtctcttgactcctacatgttctattgcctcatgcagtagtacattttagagcgcaagaatgttgcagcatcctcaaacttcctagggtagattctgttgaaaaactgtcggtgcacatctgtaatcccagcactttgggagactgaggtaggcagattgcttgggctcaggagtttgagaccagcctgggcaacatggtgaaactgcccaggtgcagtggctcaatcttggcccactgcagcctccacccctggggatcaaatgattcttgtgcctcagcctccctcagctgggattacaggcatgtgccaccacgctatttttttttttttttttttgtatttttagtagagacagggttttgctatgttggccaggctcgtcttgaactcctgacctcaagttatctgtccgccttggcctcccaaagtgctgggattacaggtgtgagccacactgtgcctgccctcaaccctgtttctacaaaaaaaaaaaaaaaaaaaaaattggttgggtgtggtggcgcataccagtagtcccagctacttggtggtgggaggatcgcttgagccctggaggttgaggttgctgtgagctgagattgtgccactgtactccagcacaggccacagaatgagaccctgtctcaaaaagaaaaaaagaaaaactgtgtgctgttagatctggcacagttagcacacagatggtattttattctgagttctaattgtttgccttattgctctagaaactatttagaagacttcactgctcttatactgaacacaccttatctgctggatctgggaagaaagtgatcaggagcaacttgggcttagctatattataattagaatagattgcagactgttaaaatagttacacacgtatgtgtctttttttgaggggagtatgcattgttcagctgggaaacacatttattttctgttggattaagcggtttcttaaagattcaataaataaaccactcacaacttagaatttgtttttcttaaaaatgtatgctaataccctgtgcattacctgtcttaaaaactggaacttataatgtggccttgaaaacagtgaaatgcagtgaggtttaatgggattggggccagaagacttgtataataatataaccttgggcaagtctcagtaacctgagcctcaggttcttcatgtaaaataggtatagtaataatcatctcacaaagtgattgtgaaatgtcagagattatcaaagttgataattacttatcaactttggttgagaatcatttgaacctcgggggcggaggttgcactttgtaatttgtgaagtgctaaagaaagttgtcattaaattatcataattcagccccagacctaatttatacttctgtctcctttaattggcctgattaaagtttgattcatttgcttttctgtacttaccttatgtggaatttgggaaaagtaagtatggagctggagccctgatcacttagggagaatctgaatgaaaaatggggaaacccttatatagaatcagtctgttgggagaatttgaatgaaaaatagggaaatatagaatcattagtatgttttcagctatttccctgtgagactaatcgatttaaaggctatacttagattttttttaatgacactttcattttatatgtagtatacattttctgatagttctgctggattatgcattctcattactaagtttcccactgcccaccattctgaaagataaattttcagagaagtaagttgtcttgttctttgtttgagacagggtctcattgtgtcgcccaggctggagtgcagtgccatgatcatagatagctcagtgcagtcttgacttcctcagcacaagcaatcctcccacctcagcttaccctgtagctgcaaccacagtcacttaccaccatgactggctaatttttttatttttagtagggatggggtctcattatattgctcaggtttgtcccaaactcctgggctcaagcgagcctcctaccttggcgtcccaaagtgttgggattacaggtgtgagccactgtgcccaacctgtcgtttttattgtgatgtgaatttgattgttttcttttttctttccttttttttttttttttttttgagacagggtctcactctgccacccaggctggagtgcagtggcataatcacagctcattgcagcctcagcttcccgagtagctgggatcacaggtgtgtaccaccacacccagctaattttttttattatctgtggagattgggggcggggcagggtggtcttcctagcttgcccaggctggtctcgaactcctggactcaagccattctcccacattggcttcccaaagtgctgtgattatgggtgtgagccacaacgcctggcttttttttttaatagtgtcgtgaactgctaagcttaagtgatctcctcacctcagccactgagtagctgggactataggcatgtactaccacacctggccatgatggttttcttaattactcttttaaggaagctattgtttcttgggaaagctcaagtaattcttggttttatttttgtaggctcagatcaccatgaaagtaatccaaggcttgtacagtggggtcaccacagtggaactagatactttggctgctgaaacagctgcaaccttgactactaagcaccctgactatgctatcctggcagccaggatcgctgtctctaacttgcacaaagaaacaaagaaagtgttcagtggtaagtctggggtgaaaaagtaaaaatttagtactctcagaaaagtaataagggtactagaaataaatcttgactgtttaaagaagcaaatatggctagatggggtggcttacacctcgaatcccagcaatttgggaggccaaggcaggcaaatcgcttgagtccaggagtttgagaccagcctgggcaatgtggcgaaaccccatctctacgttttaagaaaaatctaaaattataaaatagactaggtgcagtggctcacgcctgtaatcccagtgctttgggaggctgaggcaggtggatcgctgaggtcaggagtttgagaccagcctggccaacatggcgaaaccctttctctactaaaaatacaaaaaattagctgggcgtggtggtgggggcctgtaatcccagctactggggaggctgaggcaggagaattgcttgaacccgggaggcggaggttgcagtgagctgagactgtgccactgcactcctgcctgggcaacagagtgagactccgtctcataaataaataaataaataaataaatagcaaatatgtaaattagtgggaaagagcagactacaatttcgtatttctccatgctgcctatctgctgcataaaaaggttgatggatctttgttctttttttcattttctctttttaaaatttttttattttttttgagataaagttttgctcttatcgcctaggctggagtgcaatggtgtgatttcggctcactgcaacctccgcctcccgggttcaagtgattctcctgcctcagcctcccgagtagttgggactacaggctcccatcaccacgcccggctaattttttgtatttttagtagagacgggtttcaccgtgttagccaggatggtctcaatctcctgacctcgtgatccacccgcctcggcctcccaaagtcctgggattacaggcgtgagccaccgcgcccggcccaggaatctattttaaactacaagaacttataatcactttaactctagaagattgtttccttaaatgaggcattacatatttcttcaacatatatgtgtttattgagcactttatatgctaggcattgaggtgggttgagatgacaaaaagggttgagaaccactgttttcaactattacctaaagattgaattagctgttaagtggtcttgatatattttcattttttgttgtattttttagatgtgatggaagacctctataactacataaatccacataatggcaaacactctcccatggtggccaagtcaacattggatattgttctggccaataaagatgtatgtataacacttatctggtggaaattttttgagagtcttttttaataatgcacacattttagaaaatttaaacactgcaaaagatacaggtaaatactaattctgtttcctaccctgattcctgattttcctctctagaaacaactttatcattttaaaatgtatttttccagagctattttgtacatacgtgtgtgcatacatgtgtatgtgtgtacatacatatttttcttctcagtggtactgtactgtgcatacagttttcattgatactttcttcacttgtaagtatatcttgtttgttctatatcagcctttatgaatttacccttttttataacagttgtataacgttccattttgtagatatattgtcattgtatgtatgtgtaagaattcctttagtgatcaatatttgtttttcatcttttcactgcagtgaatattcttgtatggtaggtgttttgctcatagatgaatatatctgtaagataaatcccttcagtagaattgctgagccaatgtgtatatgaattcaaaattttgataggcattgccaaactgactcccaaaaaggttgctcaggtaaaattttacaagctcatgctcagcaacttaaaaattatccacttgtgtttgaacctgtttcttaactagatgccagaggacagaagggaaaagatgtagcctagccagcccttttacacacaggatttatttaccgtgtatatctggacagattagagaccagttttaactttaggtaatataatgattaggccgggcgcggtagctcacgcctgtaatcccagcactttgagaggctgaggcgggtggatcacggggtcaggagatccagaccatcctggctaacacggtgaaaccccgtctctactaaaaatacaaaaaattagccaggtgtgggagctggtgcctgtagtcccagctactcaggaggctgaggctagagaatggcgtgaacccgggaggcggagcttgcagtgagccgagattgggccactgcactccagcctgggcaacagagtgagactcagtctcaaaaaaaaaaaaaaaaaaaaagaatgattaattgactatctctctaaacatgtatctgatgttaaagagactaggagaaaactgagttgtttgtgtgttgttaatttgtgtaatctcgaagacaagttgaagacaaaaatacagcagcagcaacagcaaaacctgtgtctaaaaatatacctattgatagtcaagtatttcagttctctaatattcacactgggcccatacctgcctttggcaacaaagatgaccttaaaattttaagagaaaaggaaagcaagctttcgtataggtttttctagtccttagatatggatcattatgtagaaacactgtcagtattttgaaaacctggctccttttttttctctccaaaatgattatttgtacgttattgcttttattttcctctgaatgactttgtagcctacaaaaactctgtaacaaggaccagttatgctctaaaatcttactgttacaatagttctttgttggaaacttgttaaaggactatagattttgaagagcctcagaattaacataagcctgcttcctgtcattgtttattatatatactgttatatacagtttgaagtaggctagcttttaaaataaatatatatatatattagtaaatatgtggtaccaatacttttggattaatagccaatctaaaaacatgtttaaggatgataatatagtcccatttatgctcatgttttttccctctttcaaaacatactataaacataatagtaaaagtttggaaaatcacatttaatctcacaacatatatttatgtattatcttctagtgttttcatatacatgtttttaaacctaattaggatacttaatttatatgtattgtttcttttttttagaatgttagatggacttctattctacagtaataatgcttagtgttatctcattgtatcctgtgttgattttagttctggagtcagggccgagagataagagattttgtgaaaataagtaattattttaatttaattatgggttctttttcacccctatcagcgcctgaattctgctattatctatgaccgagatttctcttacaattacttcggctttaaggtaaataatgggtttcaagtatgtgggaatttatacttaaatcatgaaataaaggattttgtttatgttttggtgacagttatcaaggccataagttgtttggagttgagatggacctggggaattagtggggttaaggtagcagtggtggtttgaattaaggcaaaggtagcttatctatttgcagtttttgaattttccacatattacttctggattacctgaggagttatgcagataaattaccataagtatttcataacattctaagtatttttgcgttgataggcagtatagtatagtgtagtgactgagaacatgaatgtcagtgtccacctgaattccagtctctgctctatttcttattagcaagttatttaatctctctgtgcttgtttcctccattttagaatggggagaatataaaatttcaacaacaaatttaattaaaaaaaaattttttttttgagtctgtgtctcactgtgttgactaggctggagtgcagtggcgcgatcttggctcacttcaacctctgtctcctgagtataagcagttctcctgcctcagcctcctgagtgactgggactacaggcacacaccaccatgcccagctaatgtttgtatttttagtagagacggagtttcaccatgttggccagtctggtcttgaactcctgacctcaggtgatccacccaccttggcctcccaaagtcctgggattacaggcatgagccactgcggccaatttagtttaaatttcaatttaaagtgcctataacaggctgggcatggtggcttacgcctgtaatcccagcactttaggaagccgaggcgggctgatcactcgaggtcaggagttcgagaccagcctgggccacgtggcgaaatgccttctctactaaaaaatacaaaaattagctgggcatggtggtgcatgcctgtaattccagctacttggggggctgaggcaggagaactgcttatactcaggagacggaggttgcagtgagccaagatcgtggcactgcactccagcctgggtgacagagtgagactctgtctcaaaaaaaaaaaaaaaaaaaagtgcctgtaacagaccaggcactgctctaaacaacatatacactcatttaatccgctgaggaatccctgatgtatatgttgctcatttaatccccatgaggagtcttcaggggattaaatgagtgtaacgagtgtatatgttgcttagatccgtgcctagtctgttacaggcgctttttaagtgttagctgttgtgaagttgatgatgatgatgaatactacaacttctgttaatgtgtgtagagctggctttttccagaaattttcatgcagtctctgccgaaacaaaagtgccagtgaggaggctgagatgggaggattccttgagcttaggagtttgacaccagcctgggcaacacagggagaccatgtctctacaaaacgttttaaaaagttttttttaaaaaaagtgccaatgataattctggctaacatgacgaaaccctgtctctactaaaaatagaaaaaaaaaattagctgggcctggtggtgggcgcctgtagtcccagctactcggtagcctgaggcaggagaatggcatgaacccgggaggcagagcttgcagtgagctgagattgcgccactgcaccccagcctgggcgacagagcgagactctgtctcaaaaaaaaaaaaaaaagtgccaatgataatgttccagatgaagctaggaagagtaaatgtgctattcttttcatttgaaattttatagaaacggcgaagatttaaagagattgccttattgtggatgatatatccactgcgtctttaaaaacggtgctctgaaaattttttgttgtttctctctttctagacgctagagcggtcttatttgttgaagatcaatggaaaaggtgagaaatgaacatgtttgtctgttacattttctactcattatattgaatgtatagctttgagctataagtcttaatattcttgcttagactctagataacattttggactttaggtttagtttgtggataattgtcctgtttattagtataaagtttttctagtttccttttggtgtccttttctgaaattcaaatacgtatctcaacctactttttctgacgtctcatcatgtgaaaactcctcttttgtctatagtggctgaaagaccacaacatatgttgatgagagtatctgttgggatccacaaagaagacattgatgcagcaattgaaacatataatcttctttctgagaggtggtttactcatgcttcgcccactctcttcaatgctggtaccaaccgcccacaactttctaggtaggtgttttgagtagggaaatacgccttgacctgaagaaactgggcagttagttcatcacataaaaaataatttaatgaccttttagtagctgcctgctctgattaaatgagatttagattctggaaagatctctgactgtaatgtggtaaatgaattggagaaaaggcaaatgcttataacaaaaatgttctaaaattgattggattgtggtgatggttacacaagtctatgagtatattaaaagccattgagtagtacactttaaatggggaattatattatttgtgaattatattcctttttttttttgttgttgagacaaagtctcactctgtcacccaggctggagcgcagtgttgcgatcttggctcactgcaacctgtgcctccttggtacaagcaattctcttgcctcagcctcctgagtagctgggattacaggtgcccgccaccacacccagccaatttttgtatttttagtagagatggggtttcaccatgttggtcaggctggtcttaaactcctgacctcaggtgatccacccgccttggcctcccaaagtgctgggattgtaggcatgagccaccacgcttggtgtgaattatatttcaataaggttgttttaaaaagaaggtaagtgccaagaactagttaggggactcttatagcagtttatataagaaattgtggtagtctagattagggaggtgaaagtagaaattgacagaagcagatagatcaaaagatatttagggccaggcatggtggctcacatctgtaattccaacactttggaaggctgaggtgggaagatcacttgaggtcagaagttcaaggctgccgtgagccatgattatgccactgcactgtagcctgggcaacacagtgataccttgattaagataaaaatatatataaaagatatttaggctgtcaaattgacagaatatgggtcaagaatggttcttgcatttatggatacagtaagtaacaggattaatgatgatgccatttgttgagaaaaggaacactaacggtctggtaatacattaaaaaaaaaaatatgccattatcaagttggtttgtttcaggaattcaagaacatggtaacatcaaaaaatacattaatgtaattcattgcattaacattttatgcagtttaatgctctttcataataaacactttagcaaaattgatatagaaaataacttccttaatttggcaaaagatacccaataaaaacctagatgtatcgtctcttttttcagcatggtagtggaggcctgagccagcattgtaaaataagaaaaagaaaagattggaaatcagggaacaaaactgtaatgatttgaagaaatgatttttacataggaaactcaagagcatctgcagacacattattagaaataaaagatttcagcaaaatatctggatataggttcaatatacatcaatcagttatgtttctgtactttagctgttagaaaattaagtcttaacctacagccatgcattacttaacgatggggatatattctgagaaatgtgttgtaaggtgatttccttgtgcaaacattatacagtatacttaggtaagcctagattgtatagcctactacacacataggatatatggcatggcctgttgctgctcataggttacaaacctgtgtagcatgttactgtactgaatactgtaggcctttgtattaccatggtaagtatttgtgtatccaaacatatcacagtaaaagtaccctataaaagataaaaaatgggccaggcgtggtggctcacgcctgtaatcctagcatgttgggaggccgaggcgggcggattgcctgagctcaggagttcgaaaccagcctgggcaacatggtgaaaccctgtctgtactaaaaatatagatataaaaaaactagccaggcatagcagtgtgcacctgtagtcccagcgactcaggaggctgagacaggagaattgcttgaacctgggaggcagaggttgcagtgagccaagatcgcgccactgcactccagcctgggcaacagagcgagactccgtctccaaaaaagaaagaaaagataaaaaaaaagatacaaaatgatacatctgtataggacagttatcatgaatagagcttgtaggactgaaaattgctatgggtgagttagtgagtgagtggtgaatgaatatgaaggcctggctgggcgtggtgggtcatgcctgtaatctcagcactttgggaggctgaggcaggtggatcacgaggtcaggagttcaagaccaacagggccaacatggtgaaaccctgtctctactaaaaatacaaaaattagctgggtatggtggcaggcgcctgtaatccactacttgggaggctgaggcaggagaattgcttgaacctggaaggcggaggttgcagtgagccaacatcgcaccactacactccagcctgggcaacaggagcgaaactctatcttaaaaaaaaaaaaaaaaggaatatgaaggcctagtacattactgacgactgtagactgtacaaacattgtgcacactaaatttattttaaaaatattttcttcaataataaattaaccttcgattactggatgaccactgtcgtatgtgtagtccatcgttgactttttttgtttgtttttaagacagagtctcactcttttgcccaggctggagtgcagtggcatgatcttggcttactgcagcctgcacctcccaggtccaagtgattctcctgcctcagctttacaaatagttgggattacaggcgtgcaccaccacacccagctaatttttgtatttttaatacagacggggtttcaccatgttggccaggctgatctcaaactcctgaccttgagtgatccgtcttccttggcctcccgaagtgctgggattacaggcatgagctaccatgcccggttttttaagttttttagaaatttctctaaaacatgattaaaggacattaaataataaataaatggaatagattcaattttataaaaatgtcagtttttcccaagttaaaatatagattcaaagtaattctaggcaaaatctcaacatactgattctaaaattcatgtgaaagagcaaaagactgcccaaaaatgtcaggtcgaaattcctggaacctgtaaatgttacctgataaggaaagtggtctttgtagagatgataaggattttgacatggagagattatcttgaattatgtgggtgggcccttaatccaatcaaaagtatccttgtaagagagaggctgagggagataacgactcacagaaggggagaaagtgatgtaaagatggagggagaaattggagtcatgtggccacaaaggagagcaattagccactaaaagctggacaaagcaaggaacagattctccctcaaaacctctggagggagcactccaaaaaaaaaaaaaaaagtgagttgcagacattgtgactcttgatacctccacttacctttttttttgagatggagtttcgctcttgtcactgaggctggagtgcagtggcacgattttggcttactgcaacctctgcctcccgggttcaagcaattctcctgcctcagcctcctgagtagctgggattacaggcacgcgccaccacacccagctaatttttgtatttttagtacagatggggtttgtccatgttggccaggctggtctcgaactcctgacctcaggtgatccacctgcctgggcctcccaaagtgctgggattagaggtgtgagccactgcgcctggccctacttccacttatatctcgataggagaatatataatatgacctcagagcaaaacaccatagagcaaaacattggaaaaattgactacaattaaaaacttctgtgtgaaaggcaatggaagggcaccgtggatcaataaggccgagaggcgagacaaagagggcaaaaatcttctttattgagctctcgggcgaggttcactggtccgcagggggagggccagggaagtctcgctgtgccaaaggtgcagcgtgcttttatggatgctgggtgaggagtggtcagggtaggggcagggtcggttgagtttcacgcttctgagtgtgacacgccctagtgggcatgtgcgttagtcggggtggcaggaacaggaaaggtgaacccggaaatgctgagtcagggtgtccgaggtggcgatcgccatcttggagtcttcaccggagtccaatcactgtgaaccaaaaacgaagtcaaataacaagtttcacactttgggaggccaaggtgggtggattacctgaggtcaggagttcgagaccagcctggccaacatggcgaaaccctgtctttactaaaaatacaactattagccaggcgtggtggcgtatgcccataatcccagctactcaggaagctgaggcatgagaatcatttgaacctgggagacggagcttgcagtgagccaagatcatgccactgtactgcagcctgggcaaaagagtgagactctgtctcaaaaacaacaacaacaaaaacacccaaaaaaacaagtttcagactgggagaagatatttgcaacatgttaactattgagagattataagaaaaacaaggccaggtgcagtggcttctgcctgtaattccaacactctgggaggccaaagcaaaggctggcttgagggcagaatttgaaaccagcctgggcaacataatgagagcctgtctctacaaaagtagaaaattagccaggcgtggtggtgcacacctgtagatttagctacttgaaaggctgaggtgggaggatcgctcgagcccaggaggtcaaagctgctgtgagctatgatcatgccactgcactccagcctgggtaacagagttaaaccctgtctcaaaaaaaaagaaaagaaaagaaaagaaaaacagaaagccaaatagaaacatgggcaagggctataaacaaataatgcatggaagaagaaacttgattggctaataaacgtctgagatgttaaactgtgcaataggaaaatgaaaattatgtatatatatatttgataaaaatgaaaaggctgacaattccaagcactgataagaatgtggagcacaaggaaatctcatacattgctagaaatagatttgtccatccactttggagaatctttagtaaagtgaaacgtgtatatcttttgacccagcagttcctctcctaggttcatattctacagaaatgcttagagataaacacaaggtgttgtgttcaagaatttttatagcagcattgtttggaattgcaaatgaattggaaataatccagatgttcatcaacaggcacatgggacaaatgttttggtatatttatacaatagaataccttatagcaatgaaaataaagtttgtttacatatatcaaaaggattaatttctgtaaagcaatattgaattaaaacaagttgcagaatgataaacagatatgcaaccagaaaaattctaagtgtataacatgtaaaaatgtcataaaggaaatgcttgaaaatgttagaggattgcaatgagggtatatttgtggtgtctaattttttgaggtaggtggcaagtacagagtatttgttacatcattctctatatttttctgaatgtctgaatatttatataaacacctagtcaatagatagaatccatttgcatgattgaatattcaaggcagtgaagagattattgatagagtaaggttcctgaggtggggagcaggatgagatccaaagtgaggtaaaggggttgtctttaaaaagactgtaaaggagctatgattttggtagacgtatcaaagaattggttgacaattggagagattattttcataaatgtttgtttttcttggcttactaacaacctgaaaagacggtgatgtatgtttatgaatatgcatgagaaaatgtgaaaatagcacgtttgcagtctggtgaaaatgtaagccaatattttagacttatctataagacttcctactaggcttatttacttactatctaggggaggcagcaagatgattttaaaatgatatttcgatatgttttattgtgtcatgtacagtaaagtgggttttcttctttgaaaatcatttaggaactttctaaacttcaactcttttttttttttttgccttagtgtctttgtgttgagtaatcatttttgtgactctgcttcatttccttgctctaagttgagacattttttcccccgtagctgttttcttctgagtatgaaagatgacagcattgaaggcatttatgacactctaaagcaatgtgcattgatttctaagtctgctggaggaattggtgttgctgtgagttgtattcgggctactggcagctacattgctggggtaggtttctgccatttgacttttaaagggggattcaagtctaaaagcaaacagattcatggttgagagggcatatgctattttttgggagtcctgggtctctgttaaattactaaatggctatgtgacttggagtgagtcattttacttctggcttcattttcatctatgatattagatatttagatttgactagataatctctagaatcctttttagctcaggttttagaattctggcttattttagcagtaataagagcagttatcattgattgattgcttactgtatgttaagtttgttataaatgttttacatgaggtactcatttgacccttactacaacgctatgaggtaactatgattatagactcatgccaggaattttattccttaaaataaccttgtgaataaaggtaccattgtctaattttacaagtgaggaaattgagacttagaaagttgttactttctgagatcaatcacttaatatgtggtagagccaggattcaagatttatgcattgacactttatgatgtaaactttagccctttgttagtttactgttcaatgggagtcaagataatagttttggatttaaatcctagctccactacttaactagtaatgtggcctagagttagttattttgtgtctgagtttgtttccttttctgtaaggtgaagaaaatatctaactctgtagaataaagttccagaaggaaattattccattatgttgtgttttggaggtgctgtgatatatacagcactttacacagtggtagagtgagctattgctcacttatctttctagactgtttaaaggcttgtgttgggatcagaagggttaaagaatttgatgaagtatcttctagtcgtaggagtctctattttcttaacatcattctagagtccacttattgctgagaatctccttttaccttatttattgccctgatatagctatcgcatataattcttattgtaaattgccttgatttcttttgggaaaaaggcattgtagtagtgtttatattcttttttactctacccaaagtgtatctttatataacgacctttagaagatgtagagtttaaatttagctaccttgattttggatccctttggcctgtaattgttacatctcattataaattagaaatgccatgaggtaacttagtacataattgtaatttattcaacattttgttgattttatttgggcatttttccaaagcagaagtagagatggagagcaggtaaaacttcatagattgctacctagaaattaggcatcttttttgataaaagaatggggccatttttttcttttctttgctgagtgccctctgtcatttctatcatggtctctcttttagactaatggcaattccaatggccttgtaccgatgctgagagtatataacaacacagctcgatatgtggatcaaggtgggaacaaggtatgctccatgaattgaaagtactggaaatcagaactaaaggtgatttagtcatatacacttaagatggttcatttatgtgtagtttctaattaccttttttttacttgtaaaatcaatttgaggaggtataattattttaatatgcatatactttaaatgtacagtttgatgggttttgacaaatgtatacacttgtgtaatcaccacattgataaagaggtagaacatttccattaccccaaaatcttttctccctcatatacctttacattcagtcacccctgtcacccctacccacacatactttatccctggctctagacagccactgatctattcagctttcttacatgatagttcgtttgcaaagaatttctcaagttgtaattcatataaatttgttacttgaaatggggttgtaacatgtgctctaggtttttctttcgtttttttttttatctctctcttatcacccaggctggagtgcaatggtgcgatcttggctcaccgtagccttgacctcctggacttaagtgattcttctgcctcagccctcccatgtagctcagactataggcctgtgccaccacacccagctaatttttatattttttgtagaggcgggggtctcactttcttgcctaggctgatctcaaactcctaggctcaagcaatctacctgccttggcctcccaaagtgttgggattatgggtgttagccactgcacctcgcctaggttgttcttaaaacaaaaacaaaaactacctggaataacaaaactctccctaattggctggatgcagtggctcctgccagtaatcccagcactttgggaggctgaggtgggctgatcgtgtaagctcacaagttcaagaccacgagttcaagctcacgagttcaacatgacgcaaccccatctccacaaaaaatacaaaaattaaccgggtgtggtggcgaacgcctgtagtttcagcttctctggaggctgaggtgggaggatggcttgagcccggtaggcaggaggttgcagtgagccgagattataccactgcactccagcctgggcggtagagctagaacttgtctcaaacaaaacagaacaaacaaacaaaaactctccctaattgatagaagaaacagtaaagttgagagaattgggttgtttaccttattttatcaacaggatggtttacaactagagtctgccttttgtgactgtaggcacactaatcgcttgttggtttatgaatttctctctgatggactttggggaccttgataagacagatcaactttttgacctacaataagagcatggcttatactgtcaaagcaacttcctttgggctttatgtacatgtcatgtggtgtaaagagagctgggctgttgctgaagaggaggctccatctgtagttcatcatgtcactttagaaaagttaatcttgtttcacattttgtttatatcattcgttcgtttttactcatagaattgtaaaatattacttttacaattatatatggaaaacttacacttttataatacttttatttatgttatttaattcattgtagtgaaaatcaaaggagatactataaaagtgctttgggagacatgatgtttctttgtttcatttttattctgaagagaattatgatttatttaccactagcgtcctggggcatttgctatttacctggagccttggcatttagacatctttgaattccttgatttaaagaagaacacaggaaaggaagagcagcgtgccagagatcttttctttgctctttggattccggatctcttcatgaaacgagtggagactaatcaggtgagagataggtacttgttggtaatagcaacttgattcacatgagctttctcttttttagtcatcttaagtcatgcttaggaagagcccatatgtgtgtgatgccacagaaggcattctgaacaagttaagagatgccgtgcttgtcttcttatatttctattctctaaagtagatgctttgtgacctaaatgcttaaaaggtcatgtataaacaggcagacctagatgtttgggcctgaacctgaaaatgattatttctacagcaaatttccaagagagcttgtaaaagtcaccttatgcttgcagtgtttctaatggattatggttggctatttgaagtttcttatgagtgattttgtcctttcctttttaggactggtctttgatgtgtccaaatgagtgtcctggtctggatgaggtttggggagaggaatttgagaaactatatgcaaggtatgggaaaaatatgaaagaaaacaataatgttttaatcatggtttctcttatttcaggggtccaaatatcaaaagtacttgtcaagaatcttttgaagcatctaagagaaaaagtgactaataattttggtcagatttgcttcctgactcttcaccaaaattgagttgtgtcttcttctttcttaaaactttggaatgtataaataggttcttgggatttttaattgatccttttaaaatttaagatgactagtagggttattattttgctctgtcatatagtacttttgataagctatgctttatgttgcataaaggaatcatgagtgactaggacacatatgtcagtagtttattaaaattaaataggtcaggtgcagtggctcacatctgtagtctcagcactttgggaagatgaggcaggtggatcatttgaggtcaggagttcaagaccagcctggccaacatggtgaaaccctgtctctagtaaaaatacaaaaattagctgggcgtggtggtgcacacctgtagtcccagctacttgggaggctgaggtaggagaattgcttgaacctgggaggtggaggttgcagtgagctgagattgtgccactgcactccagcctgggtgatagaacgaaactccgtctcaaaaaaaaaaaaaggaaaaaaatttagcacagtcttaagagatttggcttccttagtttttactcctttttattatgaaagatattattggtttagtgggattgcgatcatctgaaggcacctaaaactgcctcattttcccctatggctttagctagagtaaaataaatatcatattcctttttttctttagcaaaacttagagaaaatttaagagttttcataactttatattttaatgtcttcaagttgtctacaataaagtttttttagggaatatatattaaataatattatctgtgcctttcagttatgagaaacaaggtcgtgtccgcaaagttgtaaaagctcagcagctttggtatgccatcattgagtctcagacggaaacaggcaccccgtatatgctctacaaagattcctgtaatcgaaagagcaaccagcagaacctgggaaccatcaaatgcagcaacctgtgcacagaaatagtggagtacaccagcaaagatgaggtaggtagaaaaaattcttcctagagtactaagaagagaaccttaggcagttattatttgtgaattcctcacttgatttcacttgagataagtgaagggagtttgcatagttgtaagcagaagaacactgttaaaggcagagagcaaaggaaggaaagggtatgatctgtgcctataaatgttttttagtctaagccgtgtgggaaagacacagttttttcttatacacacatcactgtaataacatttactcaagaaaaatagaaatatacagttatgttagtttaggacacacacaaaaatgtgttaggatgtacattcaatttaaactatgtaagccttgagcctggaaagtggaggctgcagtgggctgagattgtgccactgtactccatcctgggcgacaaagtgagaccctgtctcaaaacaaacaaacaaaaaaccaaaaacaacaacaacaaaagtatgtaagcttataaagagagtcctttcagtgaatggtgagatcaaattctaatctcaagtctgtaaagagacttcacagaagaatcaaggctagaaatgggacatggatttggtgttttaaaaaaaagtttgagagaggagctttccatttggaaagagtggtctgtatgatacaccagagacagggctgggttttatgcagtgtggcaagtaagtctgttttgatggtgcaagtagattaattattggaatatggagagatggctatggctgggggaagggagatagaaggtagaagctgacacgtcacggataggtagcccttgtaggtttctgagaggaaaatagcatcaaaatgttaagatgaaaaggaaggttcttgcttctggttacagagtgtcttgctgtgagaagggattagaggttagcctagggagattgttgtactagttggatgacaggctgctttgatcttggatgtaaactatggaaacgaggaaggagtagatcctcaattctaggaccttaaaaaaaaagacaaatgaaaagtcaggaagtaaatggaaagtgagttaaatatactgctaaggttacagtttaattcaaaatttattgtgcagtagctatatgtaaaacacaatgttaagtgctctgagaatataaataaatatgctgccctctggaaacttctaatttagttggaagacatcgacatatattgaggtaactattatgcaagacagattatattatagaggctagagtgacatttttaaaataaaaatcagataatgtcatttgtctgcacaaaactactctttggcttgctaacccatgcagaattccttttttttcggggggcgtcaagatttcactctgttgcccaagctgggctgtggctcactgcaacctcaacagagttctttctttttgcaaattgagctataattcactctttttaaaatgtacaattcagtgttttttttcttttcttttcttttcttttttttagtatatctgcaagtctgtgcaaccattaccactatctaattgtagtatttatttattttatttttttttttttgagacagagtcttgctctgtcaccaggctggagtgtagtggctcgatctcggctcactgcaacctccgcctcctggattcaagcgattctcctgcctcagcctcccgagtagctgggactacaggcgcgtgccaccacacccagctaatttttgtatttttagtagggacgaggtttcactatgttggccaggatggtctcaatctcttgacctcgtgatccgcccacctcagcctcccaaagtgttgggattacaggcgtgagccaccgtgaccggcctgtagtacatttttatcactgtagataatgaaaccctttatccattagcagtcactccctgttcccttcttccctcagcccttgacaaccactaatatattttctgtctctagatttgtggacattgtggacattccataggaatggagtcatataatatgtggccttttgtgtcaggcttctttcacttaacatgttcttttattcatgttgtagcatgtatcagtacttcattcctttccatccagagttcttacagtgccctacaaggtcctacacaactggataacccacctcatctgcggttactttcccctttgttcactttgctccaaccctattaattttcttgctttttctcaaacatgtcaaccatgctcctacctcaggatttttgctccttcttccctcttgaatgttaaaatgcaccccctcttcccatagccacatgatttgctttctaacctgttcagttctttgttcatatgtaacattttcaatgaggtccttcttgacaattctgtttaaaaattatacccccttcatctttatccccagtactctctgtcttcttttcctgcctatttttcttcctggcatttattagacttctgtgattcaagctatatttaaaaaaatgggtatttggcaacatgtgtagaatggagtagatgtgaagggcatcaagagttcaactgggaaactttcagtagtccatgtgagagaagttaagactttggcttgggatagtcataatcaaaatggaaaagaaagtgtattcattcaacattatcaagacttactgtgtgccagatgtgttgctagtgctaaacatataaatataaataagatgatccttgtgtgaagaagctcactgcctcgtgtagtggagaaatcactggaagagctttttcagaaatcacaaattgagatccattgttgctaagggcttgtcagaatatcagtgaaggtgaggtggacgtgtgtgttttgaagaactctgcagtgatggaaatgttctgtatctgatggctattgagcacttgaaatatgactagtgcaactgagaaactcaaattttatttcattttaaatagatatatgtagccagtggctaccatattgcagggcactcatctactgaataatgagataggtatatgtaaaaagctaattataacatagtgtgatatatgtctggtaatagagctgtgtactgtggaacatagggttctctctctctcttacctattttgctgatgcatgttataactaacacatatgactaggtattgaagaaatagaatcagtgggatttagaaatggactgatgaatgatgaagagggagaagtcaaatataaaaatttaaaattttaatgtctgagtattagaggctcacatggtggtgtaattgacacaggaagtagaaataaaaattgtgtgattcttgacctgttttttgcattccaggttgctgtttgtaatttggcttccctggccctgaatatgtatgtcacatcagaacacacatacgactttaagaagttggctgaagtcactaaagtcgttgtccgaaacttgaataaaattattgatataaactactatcctgtaccagaggtatgaatagatttctctgcttattggtaattattgaaatccaaattgaaaggaatcaatcatgatcttcaagtcatcatttaaatggttatcaataaaatggtttgagaaaaagaggtagtctgtctcatttggtacagaatgttgcttttcctgttcagtaatgttttctccttttctttaaaatctgttgacacaaaggcatgcctatcaaataaacgccatcgccccattggaattggggtacaaggtctggcagatgcttttatcctgatgagatacccttttgagagtgcagaagcccagttactgaataagcagatctttgaaactatttattatggtgctctggaagccagctgtgaccttgccaaggagcagggcccatacgaaacctatgagggctctccagttagcaaaggagtaagtatatggatggaattgtttttgcctgtgagtacctgtagtgggctgaatggtgaccccacaaaaggatatgtccacatcctaattcctggaacctgtgaatttaatttcatttggttcaaaaaaaggtattttgcagatgtaattaagaaccttgagataaggagatttacctggattatccaggtgagccctaaatctaatgacagttgtcctgcaagaggcacagaaggggaagcaacgtgactatggaggcagaaattggagtgttacaaccacaagccttggaatgctgataaccactagaagttataagaggcaaggaacagaatctcttctagtgcctctggagggagtgtggccctcccaacatgttgattttgggcttctggtcttcagaactatgagagaataaatttttgttaagttaccaagtttttagtaatttgttgcaccagccataggaaacttaaatacctttgtcctctggagtaaaaaggatactctgttttaatctcttatttagaactagtcattgctaaaataatgtaagagggatgctgccaatgttagttttctgtgggttaaaacatggcattcgttatctcacagtttccacaggtcaggagtccagacttagcttagctgggccttcttttctgggtctgtgttcaagatgttggtaagggctgtgatctcgtctgagacacagagttctcttccaagcttacctggttgttggcagaatatatttcaaggactcatggcatcttgcttctttaaggccagtgggagagaccatctctcgtttcaaaaggggcacagtctagtctcttttgagggttttcacctgataagttaggtccacataggataatgtcctcaccacccccctgtcccgcttttttttttttttttttgagacagagtctcactttgttacccaggctggagtgtgtggtgtgatcttagatcactgcaacctctgcttctcaggttgaagcagttctgctgcctcaagtctcccgagttagtagagatggggttttgccatgttggccaggctggtcttgaacttgtgacctcaagtgatccgcctgccttggcctcccaaagtgctgggattacaggcatgaatcactgcacctggcgtaatcttccttttatttaactcagaatcggctgatttgcaaccttaattacatctgcagaaacctttcacctttgccataatcgctggagtgacatgcatcctattctcaagtcatgtccatactcaagtggagattataaatagcctgtgcaccaaggtgtgggaatctgggaagctgtcttagaattctgcctttcccactgcctttattatcagtactatgattctttactatataaaatgttaatttcatttctgacattcctgctgatattagaaaatctaatgtgtggttattagaaaataggtgtttttagctaagtaaacagatcaagggacagatgaaggcactgaagaaagtaacatttttagtgttaaaaaaagagaatgtgtcagccacacccttttatgaatgttagagttttctggtttgtagatatgacatgggataatcagttttcttagcctgcttctgatcaatatgactacatggaattttgtccaggaaaatctctggagcttgtattcctcatagaggttgattagaagacagcatttgttgggatgtggggacatggcagctagtcatttgtgggttttttttttttttggtcatagttttaacttgctgtagaataaatttgagttgtgtattccttagattcttcagtatgatatgtggaatgttactcctacagacctatgggactggaaggttctcaaggagaagattgcaaagtaagtgaaaagatgtaaagtagctttgaaggcagaagggtttaggttcaccttctggatcttcagaagttagatatgtcattttaacttcttaaactcatttattacaaatggggctaaaatggcctatctcacaaaactattttgggaaaaaacttcgtaagataatatatatagtaacctggaagttgcttggcacaatgaaagcatttcagtacctggtaggaattactattattagttgatcttattttagggacttaacacacctagattaggtaattttctttctcattaaggcttttttccaactatgatttttttttttaaatgtttttcattcttatttatttcccaatttagttacatcgggcatataaatggcttttgtttgaattgattgtcataggaataatggattttggaagagtttttggagggtaatgtgtttagactatatgaaaaaaaaatttttaaattgagtttttgtaggcctttcaaactaataagcataagggattcgaaggcagacagaatgttttgcagagtgaataacaaagcaaattgtttttgttttctatcgtgatgactttgtcatttatgggttaatgcatatgcaaagtgattaatatttggagaatgaagcagtagctttaaaatgctctttaaaaaaaataaccgtttgccttaaaattgttaaattaaaattgttttcctactcaaataatacatgttagaaaatttaggaaaacatagatttggaaagagaaaatgaaaattatactaatactgcctcccccagaaaacctgtgtgcatcttagtgtctgtcatcctttaggttttcttccaagagtacacatacatgtgtatttacatggaaattcaacttttaagaaaatggacctgtactgtatttatatatatatatatatatattttttttttttttttttcccctcaaaatactatggcttagttttttatatacatgactttttttctaatttcaaaattagtatatgaacacaaatttattattaataaagctcaaatacagaaataaaatagaaagtaaaagcccttcttcatacttctgccaaccatttgtctcagaaaacaaaccaaaaaagtaacttattctttttcccagagataagacttgttaatggtgtgtatttttctagatctttttcagtacatttgcagataggtacacatacacggttttgtcatataaatgtgatcaaacttgatgtattctgggctgggcaccatgactcacgtctgtaatcccagcactttgagaggctgaggtgggtggatcacttgaggtcaggagttcaagaccagcttgggcaacatggcgaaacttagtctctactaaaaatacaaaaattagctgggcgtggtggtgcatgcctgtaatcccagctacttgggaggctgagacatgagaatcacttgaacctaggaggtggagattacagggagccgagatcatgccactgtactccagcctaggtaactgtgactctgtctcaaaaaaaagacttgatgtattctgagacttgttatttagtgatttattttggagctctttctcttttagtacctgtaggtctacctaatgtttttaattattatagacaattccatagtttgaatatatcatatatgtaggacttttcacaacatttacctgtctgtagacagatgatgttgctattttacagatgaggaagtaaagacatgaagatagttggtggtttgcttgatacctcactacaaagtgacagagtaaggtggagaaccaccccccaaaaaaagtaaataaaaaaataataataactaaaaagtagagaacccagttgtattagtcgattctcacacagttataaagaactgcctgagactgggtaatttaaaaaggaaagaggtttaattgactcacagttccgcagggttggggaggcctcaggaaacttacaatcatagcagaaggggaggcaaacaggtccttctttaatacggcggcaagcaaagtgctgagtaaagggagaaaagccccttataaaaccagatcttgtgagaactcactatctcatgagaacagcatgagggtaacctcctctgtgattaaattacctcccgccaggtccctcccgtaacgtggggattatgggaactacagttcaagatgagatttgggtggggacacagccaaactatatccagttgtacagactccgtcaggatatgaggctgtatgctaagcactgtatgaatccataggtatagaatgtaggaaagacaggctctttgtgttttaaaaacttgagactaagaaaacaagtagttaaggtatacggaaaggtacaggtcagagaaaatgtttgcagagtagatatttgtatttgacatttgtatttgtgcctgcctgatgaggaaagatgttttaaaattgctatcaattaggctgagctttgaaggtgagccaggggcagttgggagatttctcagtgtgtcagatagtgtattttctcttattagtcaaaagatgttaaccttcttgcaggaacttataattgaagaatatactttgagcataatttcttcctctttacaggataatggagaattgtggtgatatttctctgattctgaacactttctcatcattatttttccagaaggggcctagcacaatgattttataggcacttggaaaagagtgagggttggatgagtgtaacctaatacaggtggggagcgcttcaacagtgatttgaatatttccctacgcaagatagtgtatcaagtgttatgattcctgagtgccacagtccaagtggcataaatcatggtatgataaggatagccaacaataaaaattgtactaattcagtttaggagtcaggcatttaagaggagagtgggctataatagcacccatactgtggaattgcctccctgtaggagtttaatttgaaagtcaacgtgtgagttcaatgcatgtacgatgttacatttacatttactacatttatctacatttactacagtgacttaaagtagctgctttcctggcagattgtagctttgggactagtacctgataatctccttttctttaggtatggtataagaaacagtttacttattgccccgatgcctacagcttccactgctcagatcctggggaataatgagtccattgaaccttacaccagcaacatctatactcgcagagtcttgtcaggagaatttcaggtgagcagttcacaaccagccttacagggagatctttcaaaagcctgatgttgggagtaaatgctcactcatgtttaatttgcccattttcttagtttgggtgcaaactttgataaagacagtcatcttcatctctaatattattatttgttattaatatttcagcacaataggcatttaataaataatctgttgaaagaatgagtgaatgagggtcgagtatgaaagtaagttgttgatagttaaacatgatgtttaaccattatgtaatcatagtgatatattctataacttctcccagatgcttaagttaggatactcaaaatgtataaagaagtatcatttaaggcagtggttctcagacttggttaccaattagaatttatggtgggtgagaccagtggttttttctttgtttttaaggttcccaggtaattcttatgtgtagctagggttgagaacctcaatttaaaagactatttgtgaatttccagatatcttgaagtaaagttctgtaaagttcgagaaggatacgtttccaatttttttaacctaagtatttatagatttacccatcttaggcgctattcttttcacttttgcaaacgccatatgtttcttttttaatgaaaatattttttcagctttattaaggtataattgacaataaaaattgtgtataaaaccaaggtatacagtgtaatgattagatatgtgtatatattatataacgattaccacaccacaatgtttttgttgtcgatactgtttttgagaaaatgtctcactttgtcacccaggctggagtgcagtggcatgatcttggctcactgcagcctctgcctcctgggttcaagcaattctcatgcctcagcctcctgagtagctgggattacaggcatgctgcgccaccatgcctggctaattatattgtttcttgaataacagatgtcaagatcttaaaggaatatagctttcgtgtggtggcattgatgtctcgtctttataaaagatagaatttaccaagcaatctagcattaaataactcttaagtgattttagtttaagcttcaaagctgtagtcttttctaagcagtcactgttatttatttcttcatacattttctgcttttccattcagattgtaaatcctcacttattgaaagatcttaccgagcggggcctatggcatgaagagatgaaaaaccagattattgcatgcaatggctctattcaggtatagaatgaaaatgaagtgtgctctgcaggggctgagttggacattgtggtacctcctcactcatgctagacaatggagagaatgacttcattgtgttcatctaggttttgcttgtgtagctctgttcacctctgcattgttgtgctaggattgtacacatctttacataacccttaccatcttgtttttatgcaataatataaaaaagtagttctcaatttttctgcatcttagaatcaactggggagcttttaaaatcctgaagcttaggttgcattccttaccaattaaatgtctaggaacaggaaccagacatcaattttttttttttttttttttttttgagacgaagtctctgtcgcccaggctggagtgcagtggtggaatcatggctcactgcaacctctgcctcctaggttcaagcgattctcctgcctcagcctcccaagtagctgggattacaggtgcctgccaccacgcccggctgttttttgtatttttagtagagacagggtttcaccatattggccaggctcctgacctcaggtgatccgcctgccttggcctcccagggtgctaggattacatgcatgagccaccgtgcctggcctcagacatcaataatttttaaagattcttttggtgattccaaagtatatcaaaatttgggggatcatagatagaaagactgaaattaagagagtcaagcttaattaaaaatcatggttgacgactgatagtccaaaagacagagtcacaaatcgtgtaaatatttgcaactaagagtcaagaggcatttatttgcagatagaggtgtctggctaaatgttggtctgcttagcaacacagatgaagagtcctataacagttccatatttaatgacagaaactgtagcattagccagtctgtgtgttttaatgaaagttaaccctaggcctaagaaaacctgattttggattccaaagggagtttgaaatcctagcttatttaaagggttttatctcattgcttcccttggtccctgtgaattacagcccttattttttgtgttttctgcaaaactcaagggtcatttattgctgcttagctctgacttttcctttctttaagtgcctctagaagaatgaatgtttgggtcataaatcaattaaaaaattaaaaaattggtttatgaccaacaaaaaagggatgctgaaattactatcaccagattgatatttggttggttagatgggggttttgttcaactttctaaatagtcttggtaaacttgataaggatcatatcatatgatactgaatggtaaggtcagatctggcaggaagtaaaatgaagatcaaagcttgtgtcactattctattaatcatacactgctttctttaactggagtaaagtaaacattgggttttccttctttagagcataccagaaattcctgatgacctgaagcaactttataaaactgtgtgggaaatctctcagaaaactgttctcaagatggcagctgagagaggtgctttcattgatcaaagccaatctttgaacatccacattgctgagcctaactatggcaaactcactagtatgcacttctacggctggaagcaggttggtagagaatatcaaggagtacttaattgccagcttgagatattttggcattggaatgattttatgttttagccacctattaaatattatcacctagaagttctttaagttcaaatccagaacgttaaaaccaacccatggtttttgtaccagaacagggtcttgccttggattttcttgtttctgttaggtttatttccttcttaggtttgaaaccttgtagttacctgtgatgctttccttcctttactgtccgtacaattaccaagttgtgttgattgttcctttgtattatttcttaaatatcttccttccttttctgctgctgttattctaaactgaccttattgcttctaggatctctgctcccagccattttgtgtgcattaccaccattcctcagataaaactttgcacacgtcaacccgctattcaaaaacatccattgttttctcactttataaagtgaaagccagcttacttagctagtcgttgccagctgtaaagtctggtgattttggattatgttcttattccctgataatgtattgggtatttaagtagaattataaatttgttttttaatttaacatttattgaacatctagtatgtgccaggactgaggatactgaatagaagatgatgatctttatctttgaagtcttatagtctgttgttacacagagacacagtctagctctctaaacagttataacctaaggcagacatattgtcttgggcaaacctggaagtcatatgcataaaaacaaagacaaaagaataaaaatgtttgacctttccaaagagataagcctgttttaggagtgaaaagaacaggatatttctgtctgactcacaaagcatttttgagagtactcctagaggagatagaattccaagtttaaaaaaagtttgatctggttcatgggaatgtattttattttatgtatgtatgtatgtattttgagacagagactcactctgttgccccggctggagtacagcggcatgatcttggctcactgcaacctctgtcctgggttcaagtgattctcatgtcttagcctcctgagtagctaggatcacaggtgtgtgccaacacacctggctaatttttgtatttttattagagatggggttttgccatgttggccaggctggtctcaaactcctggcctcaagcaattcacctgcctcggcctcccaaagtgctcgaattacaggtgtgagccactgtgcctggccaggaatgtattttattttattttaatattattgttttattttattttatacttttttagacggagtctcgctctgttgcccaggctggagtgcaatgatacagtcttggctcactgcaacctcagcctcctgagtagctgaaatttataggcatgtactacccctcttgggggattacaggcatgagccacagcgcccagccaggaatgtatttttttgtttgtttgtttgtttgttttttctttttatttatttatttatttatttttattgatcattcttgggtgtttctcacagagggggatttggcagggtcataggacaatagtagagggagggtcagcagataaacaagtgaacaaaggtctctggttttcctaggcagaggaccctgcggccttccgcagtgtttgtgtccctgggtacttgagattagggagtggtgatgactcttaacgagcatgctgccttcaagcatctgtttaacaaagcacatcttgcaccgcccttaatccatttaaccctgagtggacacagcacatgtttcagagagcacagggttgggggtaaggtcactgatcaacaggctcacaaggcagaagaatttttcttagtacagaacaaaatgaaaagtctcccgtgtctacttctttctacacagacacggcaaccatccgatttctcaatcttttccccacctttcccgcccttctattccacaaagccgccattgtcatcttggcccgttctcaatgagctgttgggcacacctcccagacggggtggtggccaggcagaggtgctcctcacatcccagacggggcggcggggcagaggcgcccctcacctcccagacggggcggctggccaggcggggggctgaccccccacctccctcccggacggggcggctggccgggcggggggctcacacccccacctccctcccggacggggcggctggccgggccgggggctgaaccccccacctccctcccggacggggcggctggccgggcagaggggctcctcacttcccagtaggggcggccgggcagaggggcccctcacctcccggacggggcggctggccgggctgggggctgactccccccacctccctcccggacggggcggctggccgggcggggggctgacccccccacctccctcccggacggggcggctggccgggcagaggggctcctcacttcccagtaggggcggccgggcagaggcgcccctcacctcccggacggggcggctggccgggctgggggctgactccccaacctccctcccggacggggcggctggccgggctgggggctgactccccaacctccctcccggacggggcggctggccgggcggggggctcacacccccacctccctcccggatggggcagctggccgggcggggggctgacccccccacctccttcccagatggggcggctggccgggcagaggacctcctcacttcccagtaggggcggccgggcagaggcgcccctcacctcccggacggggtggctggccgggcgggggctgacccccccacctccctcctggacggggcggctggacaggaatgtattttaaatattggtgtggaatgtctagtattctcacagagtttctcctaataattgtctttactttccttgtagggtttgaagactgggatgtattatttaaggacaagaccagcggctaatccaatccagttcactctaaataaggagaagctaaaagataaagaaaaggtatcaaaagaggaagaagagaaggagaggaacacagcagccatggtgtgctctttggagaatagagatgaatgtctgatgtgtggatcctgaggaaagacttggaagagaccagcatgtcttcagtagccaaactacttcttgagcatagataggtatagtgggtttgcttgaggtggtaaggctttgctggaccctgttgcaggcaaaaggagtaattgatttaaagtactgttaatgatgataatgattttttttttaaactcatatattgggattttcaccaaaataatgcttttgaaaaaaagaaaaaaaaaacggatatattgagaatcaaagtagaagttttaggaatgcaaaataagtcatcttgcatacagggagtggttaagtaaggtttcatcacccctttagcactgcttttctgaagacttcagttttgttaaggagatttagttttactgctttgactggtgggtctctagaagcaaaactgagtgataactcatgagaagtactgataggacctttatctggatatggtcctataggttattctgaaataaagataaacatttctaagtgattgtatgagattaattttgtcatttactttcatataaaagtcaaatttgaaaaacacattttctgttctttgagaattcagggaggaaattatatgcctttttcttttcttttcctttctgtagtaaaatatacctaatatacaatttaccattttacccatgtttaaacataaaattcagtggcttaagcacattcatagtgttatactaccatcaccactatttgtttccagaacttcatcatcccaaacagaaactctgtatcaataagaacattaactccccctttcccctccaagtccctggtaacctctattctactttctgtctctatgaatatgcctcttctaggtacctcgtataaatggaatacatgtctggcttatttcatttagcataatgttttcacagtttatccatgttatagcatgtatccaaatttcattctttatgtataccacacttttttttttttttttttgagacagagtcttgctctgtcacccaggctgtacgatcttggcttggctcaccacaacgtctacctcctgggttcaagtgataagtgattcttgtgtctcagctttccaagtagctgggactataggtgcgcgccaccatgcctggctaatttttgtatttttggtagagaccagatttcaccatgttggccaggctggtctcaaacttgtggcctcaagggatctgtttgcctcggcctcctaaagtgctgggattaaatgcctgagcctccacacctggactaccacactttgttaatccacttatcttttgatggacatttgggttctttcctccttttaaggaattttgactaatgctcttgtgaacattggcttaaaagtatctattgagttcctgctttcaatttgtttgggtatgtatacaggggtgaagttgctggaaattatggtgattctatctttaactttttgaggaactaccaaacttttccacagcagctacattattttacatttccaccagcaatacaatagggtaccattttctccacatcttcatcaacacttatttttcatatttttgttttgttttgttttttgagagacggtcttgctctgttgcccaggctggagtgcaatggtaccatcatagctcactgcagccttgatctcctgggctcaaacaatcctcccatctcagcctctcaaagtcttggggttacaggtgtaagccaccacacccagctcatattttttataatagccatcttaatgacttgacaatttcattataatgtgtcttggtgtgggtctctgagtttatcctacttgggacttcctgggcttattggatttgtagattcacatcttttgttaaatttgggttgtttttggccattatttagataatttttcttcccctttctctttccttatagggacttccatagtgcatctattggttgacttgacggtgttccataggtctgttaggcgttgtttacttttctttattttttctttctattccaagacttgataatttcagtgtcctatcttccagttttctgattctctcttcttcctgctcaaatctattgttgtgctcctctagtgaatttttcatttcagttattcttttcaactccagaatttttattcttctttgtaatttttgtctctgttgatattctgattttgttaatcattgtttttctgatttcctttacttatttgttcatcttttcctttagctctttgagtatatttaatacagttgttttaatgtctttgttgagtaaatccaatgtcttggctttctcagggatggtgtctatcattttttcttgatactttgaatgggccatgttttctttctttccttttttttttttttttgtatgccttgtaatttttgttgttgaaaaatgggcatttgactgttataatgaggtaactccagtaatcagattctcctactccagagcttactgttttttgtttcattgctatgttgaagactgtagtactccatttgagacatttccaaactttttttttttttaagacagtgtctcgctgtgtcaccccaggccagaatgcagtggtgtgatcttggctcaccgcatgctctgcctctggattcaggcaattctcatgccttagccccctgagtagctgagattacaggtgtgtgccaccatgcctggctatattttgtggtgttagtagaaatgtggttttgccatgttggccaggctggtgttgaactcctggcctcaactgatccacccacctcagccccccaaagtgctggcattacaagtgtgaaccaccacgtccagcccaaactaatttttcagactattctttgtcacgtatgattgccaaagtctttgttcctttagtgcatgttcagttattgttttgacagagatatatgataccttcaaactttttgtcacactaataagattggctggttgcttttaattgcactggacaaattggagaaagaaaaggatgactttagtgatttgaattctcaacttaagtactagacctgaacatttctgtttctgctttgaaagaaactttacgttctgtagctgcagagttgagatttctgaaaccaaacccagaatctcattttgcaagtgcctgagttacaatgcaaattgaattctgagccttgcagtgtgcctttgctattaaagtgaggatattgactaggaatgaatgggatcctgaaaattggaatggtgacatatgggaagatcctgttgaagctggtaatattgaatctctaaattctgatgagtcttcattgccagtagaagcagagttaactgatttacccaaactgattatacctaattgacattaactgctttccctgaggaaactgatgtcttcctctgagataattgccttgcaggacactgctgattgtcctcaggacccaccctgaccacccctctttggttctaaacctataactagattcaagtcccagcaggccccaaaggtgaggtacaaagtgagatctatgaggaggtgtgctacactcaaaaagaactacatgattcttcccatttgagaatatgtgtggaaatggatattaaggatatgtgataatggtggaaggaacataaagttggatcaggctcagtttattgataggggcccacaaagcagaggttttggatttaatattgcagcatgggggatcgaaaagtgcctgctctagctggttggttggttggttgaaacatggaccaaaatttgccctaagtgaagttgaaatgccagtcctgccttggtatactatagaggaagtagttcaaaggcttagggagatcgaaatgttagagtggatttatcatttaaaagaccagctctcccaccctgagggaagtctggaggacacttcaccatgactgtgagaagtaaatttgtgagggaagcctcagcatccttaaagacctctgtgattgctcttttctgtaggtctgaaattacactgccactgaattgggaaacctaaattcagtgggagtaattggatcccatagtgccaggtagagacacttaattgccaaaggcagggtgggaatagttactataatggacagcagagttaaagcagcaatcagaatcgtctgacttggccagatgcagtggctcacacctgtaatcccagcactttgggaggccgaggcaggcagatcacttgaggtcaggagtttgaaatcagcctggccaacatggtgaaagcctgtctctaccaaaaatacaaaaattaacctggtgttgtggcgtgcatctgtaatcccagctacttgggaggctgaggcaggagaattgcttgaacccaggcggcagaggctgcagtgagctgagattgtgccactgcactctagcctaggtgacagagcgagactctgtctcaaaaaaaaaaaaaagtctgactcacagagatacggtttggctagatgatcatggagttcctcgaggtgaaatacatggggaatctattaaattctaacttgatctatataagcagaagagtttccggttaagtgaacaagtctaatttgaataataaaaccagaattatggcccctcaatcaattcccagatttgaactagtttacagacccagaacccctcaaatgaaagggagaccaagtccccttgaggaaggatcccactgcactatcaaagatatatactgttaaatctttctcccagcctttcccagaaggatctatggccttttactagtaactacattgggaaaaagagataatcaaaccttttgaggattactggacacagactctaaactgacactagttccaggaaactaaaacgtcactgtgatcttccagctggagtaggagcttatggaggtcaggtaatcaatggagttttacctccagtctgtctcacagtggctccagggatccctgaaaccatcctgtggttatttcactatgcagttcgggaatgcgtaattggaatagatacactcagcaactgacacagagaaccaaccatattggttctctgacttgagtgagggctattatagtgggaaagttcaagtggaagccactagaactgcctctacctaggaaaatgataaaccaaaatcaatattgcattcctggaaggatgccagaaattagtgccaccatcaaggtcttaaagtatgcagaaataatttccaccccatccccattcaactcacctgtttggcctttgcagaaaatacgaattttggagaaagacaatggattatcataagcttaactgggtgattactccaaccagaggcagttctattgcttgagcaagttaacacatatcctcatacctggtatgcagctattgatctggcaaatgcttttttctccataccccttagtaaggaccaccagaaacaagtttgttttcagccggcaaggccagcaatacaccttcaccatcctgcctcatgagtatataaactctccaaccatatatcatagtttagtttacaggattttgatcagctttctgttccacaagataccactctggtccaatacgttggtgacattatatcgattggacctatgagcaagaagtagtgacttctctagactcattggtagaatactggcatgtcagaaggtgggaaatctcactaaaattcagggccaccttctacacaggacaatttctaggcatctagtgtgaggcatgtcgagataccctttctaaggttaaggataaattgttgcatctgacgactcctacaagcaagaaagaggcatgatacttagtgtacctctttgagtcttggaggtaaaaaatcatggtaaccatttccagcttggttatggcaactgagtgcctccacgtgccactctgaaatctaattactcccattgaatttaggtttcatttggagcagcacactggggcatgctactccatcctgtttaccaaaagctgctagttctggggcccagaactacacaaggcactgccacaggtccaggctgccagggaagtttctctgctacttgggccatctgatccatcagatccagtggtgcttgaagtggcagtggcagatagagatgctcattggaggctttggcagacccctgtaagtgaatcacaggacaggcccttaggattttggaccgaagccctgccatcatcccctgtgggtaactactctccttttgagaaatagcttttggtttgccttagtagagactgaacacttaaccatgggccaccaaattaccatgtgacttgagttggctgttgtccgactcaacttgccataaaattgagcatgcacagtagcagtccatcatcaaatggaagtgatatatacaaaatcaggctcaagcaaaccctgaaggcacaagtgaccatgaagaagtgacccaaaatcccgaggtctccagttctgctacactgccttttcttccccagcctgcacctatggcctcatggggagttccctatgatcaactgacaggaagaaaaaactcaggcttgtttagtagataattctgtgcagtgtgcaggcaccgcaccccctttctgggacattacctgaacacttttcccttctgtagatgataaggagctgtggacgttttttttgttttgtttgtttttgtttttgtttttgttttaattttgagacagagtttcactctgttgcccaggctggagtgcagtggctcgatcttggctcactgcagcctctgcctcctgggttcaagcgattctcctgcctcaaccttccaagtagctgggactacaggcgcacgccaccacaccgggttaatttttgtatttttggtagagacgggctttcgccatgttggccaggctggtctcaaactcctagcctcaagtgatctgcctgcctcggcctcccaaagtgctgggattacaggtgtgagccactgcccagccagagctgtggaagtcttttaagcaggggttagcttttaggtagatcacattggctgtcataggaagaatggcctgactatgggtttggttccgactttgatctggatcccagatcagggcttagtctggtttttgggtcagacttgggctccagtgcaggaccctgtctgtgtgcctgaggtcagcacggtggcctcaaaatgtgacctgtgtgtttggctgagtttgggtttcccagggtagggtctactgtggtctttgggtcagactgggaccccgaagaagacctggtctgggtgtgtgtcagactggggacccttgggcaggagctgacctgtttgtgtgggctagactggacatcgcagggtaaacctgacctatgtgcctgtacagcttggggatctcaggaaaggacctcacttgtgtttgggactgactggactctagaacccagcctgctacctggattagactggaagcctcaaggatgacctgtgtattaggtctgaataaacttcatgtcaagcttaggctatgtttgggagagactgggcttcagggaagtgcccgcctgtttatttgtttcagactgggtgttgttcagacagggcaggttgtggtctgtatgacttgctctataagactaccttagtgaagccccatacatccagatattagttgggacttcctcaggagttgggaggaggacagagaaaataaaccaagaaggataaataggtaaatgcaattttattactgggggtgaaaacaaagagcattctaagaatttaacaagcaacagttgaccaacagggaacctgctgttgagcccgtaatctgctgaggaaatttgagcctgtccctgagtactgcctgcttatctcttctcagagatcatagccccaactttcgaaggtagtaaagtccctcaccctggcggtttccagtctcatgttctgcagcctctttggcttctccccagccttctgggctgtttccttttcacagagcatcttttctacatgttgctggatctccctagtcctcaccccataaatgacaggattcaaggctcctggaagcagcaagtatatggcactgagtagattctggacattctgggacacagtcttggctactcagaaggtgatggaagtggaaagaccagagacgtagatggagaggatgaccagtaggtgggagccacacgtgtgtaaggccttggcttgggctccccaagaagagatccggaaggcagcatagatgatgtgggtgtaggaggtccccagcagggccatatcagagattacagtgaccaaacacatagccagccccagccagttgttgaaggtcaggtctccacaagctatgctcagcagtgcaatgcactcacaggtgaagtgtcgaatcactgctgtccggcagaatcgggcttttgcagttagtactaccaagggcactgtcactcccaggctctgtgtcaaggcaagaatggccagcagtcccagcagctgggaggtcatcaggtcagaatagcagagtgggtggcagatggctacgtagcagtccagggccatggccagaggaagttgtagtccaggaggagggtgaagtagataaagaacacctaggccaggcggccatgcagcgatatggggttagcataatatacaaagccctccagcattttaggcatcacggctgtggcagcacgaatattgacagccaggagcacagtgatgagcatacacgtaggctgatgcagattttgccgggcaaccactgtgtggatgaccagggcattggcagagatgatggtcacaaagaggaagacaagaggcaggaccagaaggggccaccactctcgaagtccagggaaacccaccaggaagaacttggtgcaggagatgttgaaggtgcttgtatttccatcctcacccattagctttggccctgggccggcaccaagagtggggatcagagactgttagaacaaaatggtcaattttaaaaagactttttctgttgtagacactgaggaatttgtgataaaagcctacttcttcatgtatgtattcctttggggcacagataagtactaagccgggtgttgtaggaactacacagttacctacaatctttgtaggtaacaatctttgtcctcagggagctcttggcctcatgtgtgtgaaatgtaaatgtaaacttacaagatacttgtttacttgtaatgttccagatatttgctcagtaaaagattaggaggagaagtaggtgtagtatacacaggggaaaaagagtgacagccagagacaaaacaagaaaggttaaaagaagactcttgattcagaggaagagaaagtattagaagaatctttgatccaaggagtctgggaaggcccaagtggggcttaacagggagagaagaaccagccgggaatgatggcatcacttgtgtgcttgggacacactgtggcaaggagagatggaagttgctgaggaagaattctggtcttcctggatcacaagaaacaggctgcagagactgcttccttcctaagtcctcgtagattggctgtggtgcctgctgcctggccttgtcctcagtgtcatggatgatgagtttgctttcctttcagaatgtaggttccaggagggcagggataatagcatgcttctggtgggctcactggagctccaagcacagagtcaccatagaggcgcaggacaggcttgagaattgcttgttgagtaggtgcatgaggaacaggaagaagacaataggaggctgaacatttaattgggatcttacagcagttgtttcaaagctttggccaggggccaggactgttctacatacctgatactccacaaactaggcagcattcaacagtcttcaagctttttttttttttttttttaagaggtagggtcttgctattttgcccaggctgtttttgaactcctggactcaagcagccctcttgcctcagcctcccaggcatgagccactgcgcctggtcacttcaagcattctgaatctcagcagcaatatgaagagttagcatttattcagtacttgctacctgccagacatggttccaagtgttttccatgtgatatctctttaatacttgcagaaatcctaagagacaactttagctgtccctttgtatctgcgggagattagttccaggacctgctgtggatatcaaaatctgcagatgctcaagtcccttatataaaatggtgctgggaaaactggatatccatatgcagaagaatgaaactagatgccctacctctcatcctatacaaaaatcaagtcaagatagattaaagacctaaatgtaggacccaaaactataaaactactggaaaaaatatagatcagggaaatgatttagacattggtctgggaaaagactttatgaataacctcaaaagcacaggaaacaaaagaaaaataagcaaatgggattatatcaaattaaaaagcttctgtacagcaaaggaaataatcaacagcgtgaaaagacaacctacagaatgggagaaaatatttgctagctatttatctgacagaggattaatatccagaatatataaggaactcaaatatttcaatagcaacccccccaaaaaacaattgattaaaaatgagcaaatgatctgaacagaaatttctcaaaagaagagataaaagggcaataaatatatgaaaaaatgctcaccatccctaatcattagggaaatacaaatcaaaaccacaatgaggtaggctctcaccccagttaggatggctattatcagaaagacaaaaaaaaaaatgctgcagaggatgcaaagaaaagggaactcacatatactgttgttgggactgtaaactattaataatacaataagctattaataagccactatggagaacagtatggaagttcctcagaaaactacaaatatagctaggtgcagtgacttatgcctgtaaccccaggcactttgggaggctgcggtgggaggatcacttgaatccgggagttcgagaccagcttgggcaacatagcaagaccccatctctacaaaaagtaaaaaaattatctggacctggtggtgtgcacctgtcatcctgactactcaggaggctgaggcaggaagattgcttgagcccaggaggtcgaggctacagtgagctatgatcatgccactgctctccagccttgggtgacagagtgagatcctatctctaaaaacaagcaaaaaacaaacccaaaaaactacaactagagctactatatgatccagtaatccactactgagcgtttatctaaaggaaacaaaatcaatatattgaagagacatctattttaccatgtttattgcagcactattcacaatagccaaaatatggaatcaacctaggtgtctaacaacagatgaatggcacatgtacacaatggaatattattcagccataaaaaggaatgcagtcttgtcattcacagcaatataagtggaagtggaggacatgttaagtaaaataagccaagaacaggaagttaaatactgcatgttctcactcctatgcacaagctaaaaaattgttggtcttggtcttgtagaagtaaaagtagcacagaggacttgaggctggggaaggtagggggaaaggaaggatagggagggatttattaaatatacaacatgacagcaagatagtaggaataagttctagtgttctatacactgtaggatgactacagttaacaatacatggtttcaaatagctaggatagtaaatgttctcaggacaaagaaatgatgtatttgagatgatggatattctaattactcttatctaatcactctccattgtatgtatcaaaacatcaccatgtaccccacaaatatgtacaattatctgtgtcactaaaaaagtttaaaaattacatagagtttacatataatctatgcacatcctcccatatactttaaattgtttccagattacttgtaacacctagtacaatgtaaatgctatgtaaatagttgttataccattttttttttttttttgagacggagtctcactctgtcgcccaggctggagtgcagtggtgcaatctcggctcactgcaacctccgcctcctgggttcttgccattctcctgcctcagcctcccgagtagctgggactacaggcgcctgccagcacgcccagctaattttttgtatttttagtagagacgggttttcactgtgttagccaggatggtctccatctcctgaccttgtgatccgcccacctcggcctcccaaagtgctgggattacaggcgtgagccaccgcacccagctcttatactgtattttaaattttgtatttttttattgttgtattcttgatttttaaatttcttttcgactatttttgatctgcagttggttgaacctacagatgtcagacccatggatatagagggctgcatgcataatactatttattaacccaggttatagctgaagacactgagatttagagaggttaactaatgttcttaaagtatcataggtatacctttaaatgatagggctgggatatgacttagtgacttaggtatgtcaatggtaaaaggtggagttcagctccaatctcaggtttacctctctccaaatcccccataaatttattgttgcctcaccgtggcagcctgcagtagtctccagttgggttgcagcctgctgtgtctttggtttcgcctctgaagagctaaggctggaggtcaggtcagtgcccaactccaaggcactatgaggctgatttatgagggatggaaaattagacctgtggctccaggggagaagcctgaggagattcccagagggtagtcattccaaagggcactcaaaaggaggaaacaaggagaaacccagaagaacccatctgtccctcagagaggaccccaggagagggctgggtggaggtgacagtatccaaatttttttttttttttttttttttttgagacagagtctcactctgttgcctaggctggagtgcagtggtgcaatcttgatctcggctcactgcaacctccacctcttgggttcaagcaattctcctgcctcagcctcccgagtggctgggattacaggtgcctgccaccatgcccagctaatttttgtatttttagtaaagacagggtttcatcatgttggccaggctggtcttgaactcctgacctgaagtgatccacctgcctcagcctcccaaagtgctgggattacaggtgtgagccactgtgccaggccctgtactaacatttttttctctatggctcttggcatttttcacagagcaatcacttctgctaagggatttcccctcttttacagatgagccattagaggctcaggaagagcaagtgaggtttcagaacaagtcccatcccaggggcataaacaggcataatctgtatatcactgactaggatgacctggggctaagctgagggaaggggctcttgcaatttgaaggttaaatggacacttagggggtacccaaagtcaggaaagagctctggggtgacaataggagagcccagtggtcaagacatggatctgatttagggtctgtgtgtgtgtgtgtgtgtatgtgcatgcaagctgcggttggtgaggaatttacttctgggtggttcagaaattagggcagagagtgcagtgtgtactcagctgtgaaaaactgggaaccacagaggcaggggctggctcctccagggaggcatccagtttgtcctctggaatttggaaataggactaaaaaagctcctctttttctctttttttataccttctttggatcttctttttgtgatttcatttactctcctttgttggtttattagttgttcctctttgttgtcttatttcctcttggttgctttagggtttatagtacatatctttaacttaccacagtctatctacaagtactattaagtctttcacaaatagtgtgagatttttacaacacaacgtagctcttgtgtccattttgctttctcatttttatacagttactcattcctttatttttttcttcacatctttactgagcacttactttgtgctaggccatatgctggatgcatggatacaacaataagtaacatttgtgttccctgagtgagtctgcattctactgagtaggctagtaatgacaatcaatggtcaaaatacagcatgtaacagtatactcaacaaatgcatcccaaaatactatctgcttttaacatctaccaagtccaggaaggaccaatgccaggtcagttgaggtcatgtctactcttgagctattctccattcctgtgacttggtgaggtgaaaagccatcagttataaactagggagagaaagaaaagatagggaaaagattaagggacaaatctgactaactcccatttcccaccctgggcgtccaatttgaaggaggcacaggtggtgggggtggtgttggggcaacctctaatttcaatgtttggggcttttatagttaggtgggtgtggctatttgaatggttaatatgaggtggtctttgaaattaaaagtgacccaaggactttttaatattttttaaggaattaacaaagtcatattagaaacttcttgagattttgtccaaggagcagcacagatcatacctgaatggagaacaggcagaaaaagtaagctgttctggtgctccttttggagcatcgcttttccaaagcaatggtgtaagaagagctacagggccaggcacagtgactctcgtctgtaattctagcactttggtaatctgaggtggtaggattgcttgagatccaggagtttgaaagtaacctggacaatataatgggacactgtctctatagaaaataataaagaaaattagctgggtgtcgtggtgcacacttacagtcccagcttctcaggaagctgaggtgggaggattgcttgagcccaggagattgtggctgcagtgagccatgaacaagagattcaggagcatggtggatgaagatctgactgtgcctggtgtaggttgggagaggaatgagagaatgatgtattagggaaaatcaagcccagtaatgctttactgagttcaagtatgttaggttcttccagttttagcaagtgcataaaaatggaactgatatgtagatatctagagatatttgaaaggaaccaacttcaagttgaacaatctgtaatcgacattagcctttttccctttccttttttcagtcttcagatttttccaaagatttcttatgaatgtactgcagagaaatcccaaacccatgttcaaattcttccagtaagtgtaagtactttgtctaggcaagagatttgaattttactggcattgccagatgctctcttataatctcttaccatgatagggaaggggctttagttctttcagacatccttgttatgccttttctggttttaagctattttctcatgatatggggatacaaataaagtgggagatgagcaatttctttgttctttcttaatattactcacctgcccaagatctagagagcccttctgttttctttcccctttccttcattccaataacttattgaaaaccccattctggcccactcagactgcagccctccccacagcccttctgaggctgtcttggaggtgcaaggtcagagtatgaagtggggaccctgtacccaaagcttaggcagacaccctagtctagggcttgggctttcacaggcaagtatagagtcaaaaagaaatgagaaacggcctagatctcaataaatgtttggtggtggacaatcacagggataaaaagcctttgttcttccctggtccccacctgggatcataagatcagagaaccaagaactcagagactcaagaatgagagaatctaagaatcatttagaagaaaactttacaaagcaaacctgccagcattggatatgggaaggaaacgagaggagaaggcaaagattccttctccccacctataatgccatacaaagcacttttctagttttaagctgctatgtgaagtagcttactgtgtatgattactaagagaatttacaggtactgaaaacattttggggagccttcaaaccctgtgcccacctttgcccctacattactaaggtgaaagcctcccccaagccttctgcttgaccaagcattaacttcattactcaccaggacttacacagactgagagtagtaggaccagtctgctccaggcctgggtttcttgaatgcagttaaatccatcccattcctccctgtgggaagttgccagagctttctcccaggctctggcttagctcagcagggtcccaggggtagccagaatgtgaacacatcccctcaggcccttgtgggctggaggaacagcatgagcaggagcagggccttgagatgggcatattagggggccagtgatgaggggtcctgtttgggggaatagaaagatttttatctagcatttctctgtaattctttgctccttcaccctacattcttctgggtgacttcactctcttcatggctcccatctttacctgggcacctgtgactcacatgtttctacctacaggccagatgttgcccctgcatctcagagccatgtatccaatagcctgtcagtcaggggaacctcatgcctcaggggaacctcaaacatacatgccccaagctgaattcatgtcttcacaatggcatgttttctccctgttttctttttttcgaagtagtgtttatttttattttttaaataacagctttattgagatagagcccatgtaccataaaatttacccttttaaagtgctttttagtatactcacatggttttacaaccttcacaattaccttattttagaacattttcatcacccccaaaagaaactgtaacccattagcagtcattcctcagcctccccttctccaaaacctcagaaaccaccaattcactttctgtctccacaggtttgcttattctggacattcatataaacagaatcgtacaacagaatggaatcatttagcatgatgttttcaaggtccattcatgtaacatgtatcagtattttattccttgtcacagatgaataatattctatcatatggatataccacatactatttatccattcatcatttgatggacatttgggttgtttccacttttttactgttatgaataatgctgccatgaacattcatatacaagtttttatgtggacatgttttctttctctaaaaatttttaaatctatgttttaaatcgagaagtaaaagatgtatatatttatggatatatgttttcaattatttgggtatatacctaggagtgacatttctaggtcacatggtaactctatgtttaacattctgaaaaactgccaaactgttttccaacgtggctgcagcattttatatacccaccagaagcgtatgagagttctcatttctgcacatccttaccaacatttgttattgtctctttttaattttagccatcgtggtgaagtgatatctcattataattttaatttgcatttctctgatggctaccgatgttgagcatcctttcatatgctttctggccatttagcttctttagagaaactattcaaatcctttggccatttttcaattgggttatttgtccttttattgttaaggtgtaagtgttgttatattttctggatagtagacccttattggatataggatttgcaaatgttttatgccattctgtgcattatcttttcattttcttgctggtgtcctttgcagtactaaaatttttacttttgatgaagtccagtttatctatttttttctttttcttttgtgcttttgctgtcacatataaaaaactattggctaatttgaggtcacaaaaatttacttccatgttttcttctaaaagttttatagttttagctcttacgtctacaacctattttgagttagtttttgtatatgatgtgaggaaggggtccagctttattcttctgcgtgtggatatacagttgtccagcgtccgtttgttgaacaggctattctttccccatcaagctgttttggtaccctcatcattccctgtattctttaccttagtgatcttctatgctttatcttagggatgctgttactatctcttagtggggaaatctgcattctgcagagatttgtctcctccctttgctaggtcttttctaggctaaactagaaagtttgcttatatggtcctggagatggagggatgagatgcttgatttctcatgccttctgtcctgtctggccaatatttctgtggatgcctttttctctccaacctcactgttactgccctgttctgggtcacatcttttctagcctggctggcttagtgcctcttagtccatctgttccctctcctctcctcattcccaacccaaactcagctcaaactgagagaagacctattgaacattacttttcaaagtatctgctaactagttggatgaaacatggtattttattacatatctaaaactggttataattaatgttggccattgttaccatatgtgtctggtgggtcctttttctttctttttaaaaattagcagactgcttatcttttatctacttattagaaggcagcattgtatattctggcttaaatctcctctttggaattctgctgattccaaaataaaggccgactacttagcagagaatagacagtcctcttagctctggtttatgcctggctctctagcatcatttcctatatattagcaggcaagatagagatggaaagggagtgggagggggcctgggccagacatgctaatttcagagagtggctcgggtcctggaaaggaaggtggaatacttgggggtcttggattcagtaaccacacatagtgaagaagggagtctcagtgggtcctgagtcctgtgtgtggggcctatatcatgaggctgtggaggggagggctgcttccatggtacttagggcttggtcaaggcacagtggatgtggaacccggcttgtaggacctcacaggaacccaagcctgactgggagtgacacagttcttgacctgcttcagggtgggccaggggcttcccagtctgcacttagtggacacagctggacaaggtgaagcagtgggtatagagagaggctgactgcatcagcgtcccaggaccctctgccacatcagctttctttaggagccctagaagagcccaccctttctgatctccaaaaatgtgctttatattccacttccttaaatcttcatgttactagtcagagaagttgtaacttctatttatttatttttattgcggtaaaaaataacatgagattgggtcgtgcgcggtggctcatgcccaccgcgttatcccaaaggtgggattacgcctgtaatcccagcactttgggaggtagaggcaggcagatcacgaggtcaagagatagagaccatcctggccaacatggtgaaaccccgtctctactaaaaatacaaaaaaattagctgggcatggtggcatgcacctgtagtcccagctactcaggaggctgaggcaggagaatcacttgaactcaggtggcagaggttgcagtgagccgagattatgccactgcactccagcctggtgacagagcgagactccatctccaaaaaaaaaaaaaagagattaaccctcttaattaagtgtacagtaaagtattgtttactaaaagtacaatattttgtagcatatctctagaaccttttcatcttgcataactaaaactttatacccaactgaaaagcaactccccattttcccctctccctagtccctggcaactaccattctaccatctgtttctatgagtctgactaaaagatacttcatgtaagtggaatcatgcagcatttatttttctgtgactggcttatttcactcagcatagtgtcctcaagtgtcatctatgttgtagcatatgacaggattttcttttttaatgactgaatattctatttctatttctttttcttttttttggggatggagtcttgctctatcacccaggctggagtgcactggtgcgatcttggcttactgcaacctccacctcacaggttcaagagattctcttgcttcagcctcccgagtagctgggactataggtgtgtgcaccatgtctggctaatttctgtatttttagtagagacagggttttaccattttgggctggctggtcttgaactcttgacttcaggtgatccacccaccttggcctcccaaagtgttgggattataggtgtgagctactgtacctggcctgaatattctacttcttgatagaaaaaaacagactctgtaaaatatttgaagagggttatcctgagaacatgtgcccaaggtggttgggttgagcttggttttatacattttagggagacagatgttattggtggggggagcagttgtgtgggggttgccaggtcataggtggattcaaagatttcctgattggcaattggttgaaaaggttaagctttgcctaaagagttgaagtcagcagaaagaaatgcttgaattaaggggggttgtggaagccaaggttcttgttatgtagataaagcttctaagtaacaggcctcagagaggatagatggagcttctgaacagcaaaagaaactaccatcagagtgaacaggcaatctacaaaatgggagaaaattttcgcaacctactcatctgacaaagggctaatatccagaatctacaatgaactcaaacaaatttacaagaaaaaaacaaccccatcaaaaagtgggcaaaggatatgaacagacacttctcaaaagaagacatttatgcagccaaaagacacatgaaaaaatgctcatcatcactggccatcagagaaatgcaaatcaaaaccacaatgagataccatctcacaccagttagaatggcaatcattaaaaagtcatgaaacaacaggtgctggagaggatgtggagaagtaggaacacttttacactgttggtgggactgtaaactagttcaaccattgtggaagtcagtgtggcgattcctcagggatctagaactaaaaatgccatttgacccagccatcccattactgggtatatacccaaaggactataaatcatgctgctataaagacacatgcacacgtatgtttattgtggcactattcacaatagcaaagacttggaaccaacccaaatgtccaataatgatagactggatgaagaaaatgtggcacatatacaccatggaatactatgcagccataaaaaatgatgagttcatctcctttgtagggacatggatgaaattggaaatcatcattctcagtaaactatcgcaaggacaaaaaaccaaacaccacatgttctcactcgtagaagggaattgaacaatgagaacacatggacacaggaagggggccatcacactctggggactgttgtggggtggggggaggggggagggatagcattaggagatatacctaatgctaaatgacgagttaatgggtgcagcacaccagcatggcacatgtatacatatgtaactaacctgcacattgtgcacatgtaccctaaaacttaaagtttaataataataaaaaaagaaaaataaaaaaaatcaaagaaaatctaaaaaaaaaacaaaaaaaaccccaaaaaacaaaaaaacaaacaaaatacatctcttattggcctttaaaaggtgtcaggctctctggaaaatacctagtaaagggaagagatgactctctacagaacggagatttccccactaagagacagctttgcaaggtcacttcaaaatacgtcaaaggaaatatattttggggtaaaatactttgatttccttcagggcctaccatctgtcaagtgatgctataccagagtctggagttggatctacaaagagtagagtctatttgctacaaagagtctattttttcagtcttatgatctctattttaatgtgaatgctggtcagttgtacctaaactctaaagggagaagggtataaccaggcatgtctgatccccacttctcatcatggcctgaactagcttttcaggtttctttgggatccccttggtcaagagagggctccattcagtgagttgggggcttagatttttatttttgggtttacacattgcacatacatcatattttctttatctgttcatttattcatggacatttaggttctttccacctcttgctattgtgaataatgctgcaataaacatgagagtgcagatatctctctaatatcttgatttcaattcttttgggtaaatacccagatgtaggactgttggatgatatggtagctctatattaaatttgaggcttcgtaacttttaatgtttcctgctgtgccatgtatttttcctttgtccctccagatctacttgctatcttttccattctgctgtctgcctgtttcaggaagactgcatcagcacattaccttgcctgctggctttcagtggcttcagccaaatttcactccccactagagtaggaggttgggagaacactgaggtcagggagttggttcccctggctccctctctgccaggtcacagattccttgctgaagaccacatccctggttgggtgacgtttttctatcactactttttgggtttctgtgtctactctctccatttgaccctcagatcatggggtggtcctggctctttgctgtgcaaattcaagggtgctgccctgtccctcattggcttacttaatcccatctgtgtttataaatagtccctcattatactctccccaattatcctctttgagtgtcccgtctctgtccttctgggccctgacaatcagagatggtggacatatcctaaacccaatgaatggttataccttttctggctcaagtcgctattttctgtccatccttggtgcttggtgacacttctccaatccttgaagcagaggtcttctctgatcttatcatagtggtctttacttatcagcaaacatcagaggtaaacaatcagcctcatgggaagagggaggttgtttcttcccagggtagcctgtggcctctgctgtttcagttgtggtagttcttgaagcctgttatctgaagtcaccagcatttactttaaataaaacacaaactctctagcttagctccaaggcctttcaaaatgtgatgccagaccatctcttcaatacttgtgtctttctctacatctgttctactgtgttttacccaaacttatctattattcatgtagcaggcagaataatgacccacttcccctaaagatgcccatgttctacttccctgggaatatgaagaaagcggaggtcagagtcatgtgcttgctggcactgaagatgaagaaagatgggggaagaggacaccagacaaggaatctgggcagcctctggaagcagctaaaggcaaggaaacaggttctcccctaagtcctccagaaaggaatgcaaatcctgccgacaccttggttttagcccagtgaaacttactttggacttttgaccttcagaactgtatgataataaatttgtgttgttttaagctaccaagctggtaataatttgttacagtaacaacaggaaactaatatattccctaaatgctcatcccattctcaatataagccagtggttctcaatcttggtttacattagaatcacctaggaagccttaaaaaaataccaggacctggaccctgtctccaaagattctgatttccttaatgtctgaacattagtgtttttaaaaaagctacccaggaaactctaatataattggaaaccattgatctagacctttactcaatgctgtctcctctacaggaaatgattttctttctagcttgaagatttcaacttgggatgcccagtagaaactctagaggagtttttaaacagcaccattgtactgccaggactccattcctagaaagtctggttaaattggtctgaagtggggccaataattgattatttttttaactcttattttagtttcagggttacatgtgcaggtttgttatataggtaaattgtgtgtcatgggggtttggcatacagagtattttgtcacccagggaataagcatagtactcgataggtagtttttcagttctcgttctcctcccaccctccaccctcaagtaggacctgctgtctactgttgccatctttgtgtacaggagtacctgatgtttagctcctacttataagtgattacatgtggtatttagttttctgttcctgtgttactttggttaggataatggtctgtagctgcatccatgtttctggaaaggacattatttcattctttttttatggctgcatagtattccatggtatatatgtaccacattttctttatctagtataatgttgacgggcatctaggttgattctatgtctttactattgtgaatagtgctgcaatgaacatatgtatgtatgtgtctttatggtagaacaaatttttattcctttgggtatatacccaataatggggttgctgtactaaatggtagttataagttctttgagaaatctccaaactgctttccacagtggctgaactaatttacattcccaccagcagtgtataagtgttcccttttctgcagaagcttgccagcatctgttattttttaaattttattttattattttttgagacaaggtcttggtctgtcacccaggctagattgcagcctcaatctcctgggctcaatagagcctcccacctcagcctcctgaggtgctgggactacaggtgcacaccacactccctggtaatttttgtattttttgtagagaggaggttttgccatgttgcccaggctggtctcaaactcctgggctcaagcaatccacccactttggcctcccaaagtgctgggattataggtgtgagccactgtgcctggcctcttttggaactatcgttatgaagttttggaatagcagttatgctagtttcataatgaattcactcaatttcctaattaaatatcatgttctaggatagttttttatagcacaggaatttttcatcttttgaaagtttgggaagaacttactcataaaacctgggtccaggtgtctttcaggtaataattatttattaatgctttttgatttctttcttggtaattaatctactcaggtttttaatcttttcttaagtaaatttgaaaaattatatccttctggagatttgtctatttcataaagaattataaatttatcagcatagactcctacagggtgatttgcatttcaaccaggcaattaaataccttaacccaaataataaatctgtaatgctggtaatattttgagtcatgctccacctagctcatctcaaatcactctgtggtgtaaaaggcatttctttacagtatgtatgaaaataccatatacacactcactaaaatactcaagagacacacactccataaacacaccatcttctggagaagtggttctaccacagactgaatcccataacaaaaatattgcttctgtcctcactgctcagaccccactcttgctagtcatttgcctcactgacttatcaaaaactcagatgatgaagggttaggatctcagaaacataggccatcagaggaagaagattttatttttgtctgcacacaaggaatttaaggaagagaggaactgcaaatctgctggtagctgaaggtggtggtagccacgatccctacatgctcagcactagggcagatgggctcctcttcccatcctttttggggcctctaggacaatgtagaacatccagaatcacgaattcacaggaaccaagaacagcaacatattcacagccatatacagcagaggtctgtagaggtcaccttgctcggctcctgcctggatatgagctccctcaacttgcatgtctctagagatgagttgctcactactgtgtgttgaggccgtcagttttgtgagtgggtggctttacccagatgtctttccttactgagggctgaatctctcttcgtgtggtgtcatctccttggttctaggtctgtccccaagagcttcttggggttgttttaataggaaggagcagaggagaattaacatatttttgagggcctaccatttcttggccctgtgaagtactttcaccgctacaatttccccctcattcagcagccccaacccctctattattagacaggcattagaactgagcatcaggcacatgaggtcatcttttacccttccatttatttgttcattcaccatcgtttttgacatttgttatgtaccaggcagtctgccaggcactgaggcttaatgggctcactagatgtggtttctgtgcccaagttacttagagtccaatggagaagaaccagagtgctgtgggagcccagaggaggtctctaattcagcctccagagacaagccagtcttttaagaggaaaggatctctaatctgagaatcaacattcaagtcagccagggcaagtgcagtacaaagagctcaatgacatcaagctgagaattggtggggataggattagaactccaaagccaagtgccctttcactgtcacctcacctcaagggaggtatctgggcttgggtaagtcccataaacaaattatagaaagaaacaagatgggagagtgaaagtgagaggatgaactcacattcctgctcatttttcactgtggatgactcgggttcaaaaaggagggctagaggttaggcttaggaaaagattttctcccgagaagaccaggagctggggaggaagggaccctggtgtggactgggggtagtggtgggattgtccagagagagaggctaaccagcttgcggtgtgagtcaccctctttccttgggctttccctgcatatcccctactcctgccatcacctgcctagtaagagcctccaccctagtggccctcactgctctcctgggctgacctccagagctgatactcaccctagcaacatcaagcaggaacacagagaaccagtggggctccctaagtgtggttaaatgcacccctacttttccccaggggagcacaggctctgcctcagccaatgggcaatgaccttgagcaagagctggctgcctaactcagtctcctaggaagtgaacaggaccagcctggagtctggtctcctgacagccaggccaggcccttcctactggtctgtgttgcctaaggtatctgctctggagctgaagattcaacaaagacagagaattcacacctcataccctaaacctgcagcccaccccaggggcagctctgcccaaagcaggatcagggagtggactgtgggatctcagtcaatccagcaggtgggttctaaatatcggaaatgaggagccaagagttccaaggaagtgcaactttgactgagcacttactatgtgaggatttttgaaggatcagtggtacttctatgatgtttgtgggagaaggcggggagctggaagaaggagaatgaggctttgagagagcctgttgaagtgaggatgttatcatcccattttagaagtaggcatcgagggttagagaatttgggtgacttgttcaaggtcactcagcatatctgtggcaatgctgggatggtcatctgatccaaatctggctttctctactcacacctctgtctcacccctgctctaggccctggggaggaacagataggattcaatgatggcttcatggaggagaggacatttgggccaggcctggaaggtctggaagcagacacccaagcagaaaggaggagggcctggatggctgaggctgagctcaacatgtgggatacggactgtgatgccggcaggtgtggggctggtgaggtttgtcctgaagtcttggaagttggggagggcaggagccaaataagagtgtgaagtctggatccctggagatcctccaagggcaccggatgggtatgcttcagctttgtggctgaggtggcagcagggtggtcagagcggtccagcaggcaaccagggatggaggccccggaagaatgtggagcaccccagggactgctcacccctgggcccagctgtgaggtttgccaagaggagggatccctcatgctgggtgaggcctcaggtgaccctctgtgactccactctctcctcttccctgggcctggcctgtgcctttctcactgggctctgtggtcccctccagttctcccatgatcctccggtcagtaggggcctggccagggcacagacacccatgcaaaggtggcttctcacctcttggccctggcatggaccccactgctgccccagaatggtggtggctttcactggacacaccacttggtcacctcacaccaaggccaactcagacctccaagaattgtttgccttctcttcttaaggctctgtattagtttcctagggctgccatcacaaattgtcacaaagtgggtgcttaaatcaacagaaatgtcttatcccatggttctggtggctggaagtccaacattaaggtgttttcagggccacactccctccggaggctctagaggagaatccgcgcctggctgctcccaggttctggtgcctctggcattccttggattgcatccagtctccacctgcatcttcccatggcctcttttccatctctcatagggacatttgccattggatttagcgttcatctaggtaatctagggtgatctcatctgaagatccttaattacatctgcaaagacctttttctaagatagggcatgttcacagtctccaagggatgggacatggacatatctttgtgagagccacccctctgcctaccacagcctccaaatgtggattgtgaaggaatgagagagagagggaaaggggcagtgagggtggccttggccttggcaggttggtgtgcagagggccgtagtaggggtgggtgtgtgacaatcacaatgcgggaagcaagggtgctgctatcaggaagcctgtctggtctggtcatagcatccttgactccaatggttcagctcagaagggtgggaactcagctctgcctgtggggctgggctaagccagaaaggctccctggggtagatgagcttcaagtctttcctgaggaaagaccagctgaggggtgcagagagagcgtacaggctgaagagatgctactcaggccttttttcatgctaggagatcccagctgtgcctcttgtcaggtctagggcttttcagggcagggatgggcctcccccctcaactggggagaccctttcacagaggcaacgtctggggccagggtaaggttgtggctgcggagcacagaggggaggccccaaaggtcctcaccaggactccatggcagggacagccagggaagggagacatgaggcaggcacacatgtctcaagggcaatgtggccgccactagccctgctcccactgtcccatgcctcgtcaactcctcttttccatctcctgtcaagtgagtccaccccacgtaccaaggcaggttccaggacacgaccctgctcgcccctctccctcacaccctcatcttgttggacaccaaccctgcccatcccactgccaagctcctctcttgtctagctcctaaggcctttgtctcaggtcatctccaggcctcatgctgggccaggacccaccactccctccagcccctgtctaactctgcctccagaaggatctttcaagaaagcaaacctgaccttgtcaccctattaagaccctgcagaagctccccactgcccaccagataaagtgcaggctctctcactgggcattcaagtctctcatccgccacccctcccaggggtgcctctccagcaaggccaaactgcttgtactctgctgcccatccttctgtttgacctgtctttcctctcttagcttcacatgatactgcttgtgcttgctctaggacctcagatgccaccaactccaggaaggcctccctgagtgctcttgcccgctccaagtagctgcagcatgaggagtatcttgagtttgggactcacactgcatcccactgtggaggacactctgggcagcccagctggcctgcaactgccttagcagtccctacccccagcccagcactatggggcagaccacttgtctactgtctctccttcccttctccttcctggcccccatggcatccctgccctaacttctcctcctcagatttttctttctgtatcaagatggtcaggggcctcatattctctgtcccttctttatgtcagaacctgctctccagtgggatctgaagctccttcacacttatgcacaaaagcctgataatggctgtagttgactcctggaggaacagtggtggttattttggcacatggagtgggtggggaggttttttgggcacaggaatcttcttatcttcttgaagtccctgaaatctgtcttgggtgcatcatctattctttattttttaattaaaaatttttaattgaaggctgggtgtggtggctcatgcctgtaatcccaacactgtgggaggctgaggcgggcagatcacctaaggtcaggagttcaagatcagcctggccgacatggcgaaacagcgtctctactaaaaatacaaaaattagctggatgtggtggcgcacatctgtaattccagatactcaggaggatgaggcaggagaattgcttgaactttggaggcagaggtttcagtgagccaagatcgcaccactgcactccagcctgggtgacagaatgagtcttcgtctcaaaaaacaatttttttaattgatacataatatttgcatatatttatggggtacacatggtattttgttacatgcatagaatgtgtaacgatcaagtcagggtatttggggtatccattatcttgagaatttataattttcatatgttggaaacatttcaagtccttttttctagtaattttgatatatacaatacattgttgccaactataatcactcttgtttgctatggaactaatttcttctgtctaactgtatgtttatacccaataaccaccctctctttatctcactgccctgcacttaccagcctctggtaactgtcattctactctctactttcatgagattaacttttttagctgtcatgtatgagtgagaacatatgatatttgcctttctatgcctggcttattttacttaacttaatgaccttcagttccatccatgttgccacaaaagacatgatctcattcttttttatggctgaatactattctgctgtgtatatatacacaccacattttctttatccaatcattcattgatggacacttaggttgaatctatagttttccttctgtgaatagtgctgcaataaacatgcaagggcaggtatcttttttgatgtgacttcttttcctttgggtagatactcagtagtgtgacagatagactaaatggtgttcttatttttagttctttgagaaatctccatactgttttccatagaggttgtactaacttacatcctcaccaacagtgtatgagttctctttcctccacattctcaccaacatctgtttttttaaaaatcttttttatgatagccattctgagtggtgtaacatgatctcttgtggctttaatttgcatttcttggatgattagcgatgttgaggattttttcatatgtctattggccatttgtatttctttttttttttaaaatgtttactgatgttctttgcccactttttaaaaaaattattatactttaagttttagggtacatgtgcacattgtgcaggttagttacatatgtatacatgtgccatgctggtgcgctgcacccactaactcgtcatctagcattaggtatatctcccaatgctatccctcccctctccccccaccccacaacagtccccagagtgtgatattccccttcctgtgtccatgtgctctcattgttcaattcctacctatgagtgagaatatgtggtgtttggttttttgttcttgtgatagtttactgagaatgatgatttccaatttcatccatgtccctgcaaaggacatgagctcatcattttttatggctgcatagtattccatggtgtatatgtgccacattttcttaatccagtctatcattgttggacatttgggttggttccaagtctttgctatcgtgaataatgccacaataaacatacgtgtgcatgtgtctttatagcagcatgatttatagtcctttgggttatacccagtaatgggatggctgggtcaaatggtatttccagttctagatccctgaggaatcgccacactgacttccacaatggttgaactagtttacagtcccaccaacagtgtaaaagtgttcctatttctccacatcctctccagcacctgttgtttcctgactttttaatgattgccattctaactggtgtgagatggtatctcattgtggttttgatttgcatttctctgctggccagtgatgatgagcattttttcatgtgttttttggctgcataaatgtcttcttttgagaagtgtctgttcatgtcctttgcccactttttgatggggttgtttgtttttttcttgtaaatttgtttgagttcattgtagattctggatattagccctttgtcagatgagcaggttgcgaaaattttctcccattttgtaggttgcctgttcactctgatggtagtttcttttgctgtgcagaagctctttagtttaattagatcccatttgtctattttggcttttgttgccattgcttttggtgttttagacatgaagtccttgcccatgcctatgtcctgaatgataatgcctaggttttcttctagggtttttatggttttaggtctaatgtttaagtctttaatccatcttgaattgatttttgtataaggtgtaaggaagggatccagtttcagctttctacatatggctagccagttttcccagcaccatttattaaatagggaatcctttccccattgcttgtttttctcaggtttgtcaaagatcagatagttgtagatatgtggcgttatttctgagggctctgttctgttccattgatctatatctctgttttggtaccagtaccatgctgttttggttactgtagccttgtagtatagtttgaagtcaggtagtgtgatgcctccagctttgttcttttggcttaggattgacttggtgatgcaggctcttttttgattccatatgaactttaaagtagtttttttccaattctgtgaagaaagtcattggtagcttgatggggatggcattgaatctgtaaattaccttgggcagtatggccattttcacgatattgattcttcctacccacgagcatggaatgttcttccatttgtttgtgtcctcttttatttccttgagcagtggtttgtagttctccttgaagaggtccttcacatcccttgtaagttggattcctaggtattttattctctttgaagctattgtgaatgggagttcactcatgatttggctctctgtttgtctgttgttggtgtataagaatgcttgtgatttttgtacattgattttgtatcctgagactttgctgaagttgcttatcagcttaaggagattttgggctgagacaatggggttttctagatatacaatcatgtcgtctgcaaacagggacaatttgacttcctcttttcctaattgaataccctttatttccttctcctgcctaattgccctggccagaacttccaacactatgttgaataggagtggtgagagagggcatccctgtcttgtgccagttttcaaagggaatgcttccagtttttgcccattcagtatgatattggctgtgcgtttgtcatagatagctcttattattttgaaatacgtcccatcaatacctaatttattgagagtttttagcatgaagtgttgttgaattttgtcaaaggctttttctgcatctattgagataatcatgtggtttttgtctttggctctgtttatatgctggattacatttattgatttgtgtatattgaaccagccttgcatcccagggatgaagcccacttgatcatggtggataagctttttgatgtgctgctggattcgttttgccagtattttattgaggatttttgtatcaatgttcatcaaggatattggtctgaaattctctttttctgttgtgtctctgcctggctttggtatcagaatgatgctggcctcataaaatgagttagggaggattccctctttttctattgattggaatagtttcagaaggaatggtaccagttcctccttgtacctgtggtagaattcggctgtgaatccatctggtcctggactctttttggttggtaagctattgattattgccacaatttcagctcctgttattggtctattcagagattcaacttcttcctggtttagtcttgggagagtgtatatgtcgaggaatttatccatttcttctagattttctagttgatttgcgtagaggtgtttgtagtattctctgatggtagtttgtatttctgtgggatcggtggtgatatcccctttatcattttttattgcgtctatttgattcttctctttttttctttattagtcttgctagcggtctatcaattttgttgatcctttcaaaaaaccagctcctggattcattaattttttgaagagttttttgtgtctctatttccttcagttctgctctgattttagttatttcttgacttctgctagcttttgaatgtgtttgctcttgctttcctagttcctttaattgtgatgttagggtgtcaattttggatctttcctgctttctcttgtgggcatttagtgctataaatttccctttacacactgctttgaatgcgtcccagagattctggtatgttgggtctttgttctcgttggtttcaaagaacatctttatttctgccttcatttcattatgtacccagtagtcattcaggagcaggttgttcagtttccatgtagttgagcggttttgagtgagattcttaatcctgagttctagtttgattgcactgtggtctgagagacagtttgttataatttctgttcttttacatttgctgaggagagctttacttccaagtatgtggtcaattttggaataggtgtggtgtggtgctgaaaaaaatgtatattctgttgatttggggtggagagttctgtagatgtctattaggtccacttggtgcagagctgagttcaattcctgggtatccttgttgactttctgtcttgttgatctgtctaatgttgacagtggggtgttaaagtctcccgttattaatgtgtgggagtctaagtctctttgtaggtcactcaggacttgctttatgaatctgggtgctcctgtattaggtgcatatatatttaggatagttagctcttcttgttgaattgatccctttaccattatgtaatggccttctttgtctcttttgatctttgttggtttaaagtctgttttatcagagactaggattgcaacccatgcctttttttgttttccatttgcttggtagatcttcctccatccttttattttgagcctatgtgtgtctctgcacttgagatgggtttcctgaatacagcacactgatgggtcttgactctttatccaatttgccagtctgtgtcttttaattggagcatttagtccatttacatttaaagttaatattgttatgtgtgaatttgatcctgtcattatgatgttagctggttattttgctcattagttgatgcagtttcttcctagtctcgatggtctttacattttggcatgattttgcagcagctggtactggttgttcctttccatatttagtgcttccttcaggagctcttgtagggcaggcctggtggtgacaaaatctctcagcatttgcttgtctgtaaagtattttatttctccttcgcttatgaagcttagtttggctggatatgaaattctgggttgaaaattcttttctttaagaatgttgaatattggcccccactctcttctggcttgtagggtttctgccgagagatccgctgttagtctgatgggcttccctttgagggtaacccgacctttctctctggctgcccttaacattttttccttcatttcaactttggtgaatctgacaattatgtgtcttggagttgctcttctcgaggagtatctttgtggcgttctctgtatttcctgaatctgaacgttggcctgccttgctagattggggaagttctcctggataatatcctgcagagtgttttccaagttggttccattctccccatcactttcaggtacaccaatcagacgtagatttggtcttttcacatcgtcccatatttcttggaggctttgctcatttctttttattcttttttctctaaacttcccttctcgcttcatttcattcatttcatcttccatcgctgataccctttcttccagttgattgcatcggctcctgaggcttctgcagtcttcacgtagttctcgagccttggttttcagctccatcagctcctttaagcacttctctgtattggttattctagttatacattcttctaaatttttttcaaagttttcaacttctttgcctttggtttgaatgtcctcccgtagctcagagtaatttgatcgtctgaagccttcttctctcagctcatcaaagtcattctccatccagctttgttccgttgctggtgaggaactgcgttcctttggaggaggagaggtgctctgcttttcagagtttccagtttttctgttctgttttttccccatctttgtggttttatctacttttggtctttgatgatggtgatgtacagatgggtttttgctgtggatgtcctttctgtttgttagttttccttctaacagacaggaccctcagctgcaggtctgttggaataccctgccgtgtgaggtgtcagtgtgcccctgctggggggtgcctcccagttaggctgctcgggagtcaggggtcagggacccacttgaggaggcagtctgcccgttctcagatctccagctgcgtgctgggagaaccactgctctcttcaaagctgtcagacaggaacatttaagtctgcagaagtaactgctgtctttttgtttgtctgtgccctgcccccagaggtggagcctacagaggcaggcaggcctccttgagctatggtgggctccacccagttccagcttccaggctgctttgtttacctaatcaagcctgggtaatggcaggcgccccgcccccagcctcgctgccgccttgcagtttgatctcagactgctgtgctagcaatcagcgagactccgtgggtgtaggaccctccgagccaggtgtgggatataatctggtggtgcgccgttttttaagcccgtcggaaaaacggagtattcgggtgggagtgacccgattttccaggtgctgtccgtcacccctttctttgactgggaaagggaactaactccctgaccccttgcgcttcccaagtgaggcaatgcctcaccctgcttcggctcgcgcacggtgcgcgcacccactgacctgcgcccactgtctggcactccctagtgagatgaacccggtacctcagatggaaatgcggaaatcacccgtcttctgcgtcgctcacgctgggagctgtagacgggagctgttcctattcggccatcttggctcctccccactttgcccacttttaaatgaggttatttgttttcttactgctgagctgtttgaattccttggatattctcgggatattagttctttgttggatgaataatttgtaaatattttatcccaatcaggaggtcgtctcttcactttattgattgtttccttcgctgcacagaaactttttagtttaatatagtcccatttgtctagttttgtttttgttgcctatgcttttgatgtcttagccataaaatctttgcctacaccaaagtcctaaagtgtttccctgtgctttatgctttcttctattggttttataattttgggtgttacgtttaagtctttaatccatcctgagttgattttttgtatagtgagaaatagggtctagtttcattctttcacatatggatatccaactttcccagcactgtttattcaagagactgtccttcaatgtatattcttggcacttttgttggaaatcattggctgtaaacacatgcatgtatttctggattctctattctgttttattgttctatgtgtctgtttttattccaatagcatgctgctttggttaatatagctttgtgatatattctgaagtcagctagtgtgaaactttcggctttgttgtttttgctcaggattgctttggctatttaggctcctttttggttccagaatagttttagtgttgttttttctatttctgtcaaaactgacattggtattttgatagtgattgccttgaatctgtggtttttttgggcagtgtggtcatcttttttttttttttttttttttttttttagatggagtctcactcccgttgctcaggctggagtgcagtggcacaatcttggctcactgcaacctccacctctcaggttcaagcgattctccttcctcagcctcctgagtagctgggattacaggtgtgtgccaccatgcctggctaactttgtatttttaatagagatggggtttcaccatgttggccaggctggtcttgaactcctgacctcaggtgatccacctgcctcggcttcccaaagtgttaggattacaggtgtgagccaccgtgcccggccagtatagtcatcttaaggacatcaattattttgatttaagaacataggctctctttccatttgtttgtgtcctctttaatttatttcatcagtgttttgtagttttccttgttttttgcctcacgattaaatttattcctaggtattttattttatttttaaaagcttgttttcttttttaattggcatataataatagtacatatttatggaatcccaagttatgttttgatacatacagtgtagactttttcttccactaattttggttttggttttctcttgcttttctcattccttgaggtgcattgttagattatttgaattctttccacttttttgatgtaggcatttattgctataaactaccatttagcactgcttttgctgtatcccatagattttggtatgttgtgttttgattttcatttgtttcaagaaattttttgatttccttttaaatttcttttttgatccaatggccattcagggacatgttgtttaatttccatatatttgtgcagtttccaacattcctcttgttattaacttctggttttattttattgtggtctgagaaggtacttcatatgattttgatatttaaaaatttgtggagacttgttttgtgtgctaacatatggtttatcctggagcatgttccatatgctgatgagaagaatgtgtgttttgtagctgttggatgaaatgtcctgtaaatttttgttaggtatatttggtataatgtgcagttttaattcaatgtttctttgttaattttctgtctagatcaggggtgtccaatttcttggcttccctaaggcacattggaaaaagaattgtcttgagccacacataaaatacagtaacactaacgaatagctgatgagcttaaaataaattgcaaaagctctcattatgttttaagaaagtttatgaatttgtgttgagctgcattcaaagccatcctgggctgcatgtggcctgcaggccataggttgaacaagcttggtctagataatctgtttaatgctgagagtggggtgttgaagttcacaactcttattgtactggagtctacttctttctttacatctaataatatttgctttatatatctgggtgctctgatgttgggtgcatatatgtttagaattgttatattcttttgccaaattgatccctttatcattatataatgattgtctttatctctttttattgtttttgacttaaagtctgtcttatctcttatatgtacagctattcctgcttgcctttggttttcatttgcatggacttttttcatccctttagtttaaatctatatgtgtctttatacataaggtgagtttcttttaggaagcatatagttgggtcatgttttttaattcatttagccagtctttgtcttttatttggaaagtttaatctgtttgtattcaaggttattattgatacatgattttattaaataatttctggtggctgcattgggcttgggaggccagtccctaggcacatagtgcgtacgtatgtgtgggtgtcagctgtggtggtagaggcaggttgggtgggcctgatctcaggccctgggaaagtgtttgggtgccaaaggtgatgaactgggttgggtgattcccatacccaaagatgacatgcttaggcactgggaaggaggagtggagccaggcctggctccttaggccccttagtagtgtgtgtaggcactggctgtgttaggcagaggcaggtgatccctaggctcctggtggtatgttggggtggaggtgtcactgccaccctgctactggggagcacagggttgctttcagtggcagcagcagtaggcagggagctggggagcatgcactttgcttgtgctttggcagcagtaggcagggagctggggagcatgcactttgcttgtgctttggcagcagtaggcagggagctggggagcatgcactttgcttgtgctttggcagcagtaggcagggagctggggagcatgcactttgcttgtgctttggcagtggcagtggctgtggggcaggggagtctgtcctcagggcttgtgaaatgcatagtaactgctgctgggggcactggaatccgtgccaatggcttctgttttgaccctgggatcatccagcagctgcagaggctgtaggttgggtagcctttcctcaggccatatgaaatgtactgtcacccctctgttgggggtggggggtggagttgcaagctgatgctctcagtcaaccccttcctctgctaaccattggtttgcaggctgcataatccactctaactttgggcaggacttctaagagcttctaatctgtaactcctttttgtacaccaaccccaaccacccagccttgggaaactgagtgtacaaggcctcagcctgggtacaccgaaaggaagcagagaggagaagcgagtcaagaagcttgagatctgacacaggttctggcaagtgcccttgggccagggactcttatttcctcttccatagaaggtagatgttggactggtggcttctcatggcctttcccttcctgcatcaaacttgtgatgtttctagtgaattttgtatgattgtagtttgggaagctctttcatgttccccaattgacttgatttttcgaacacttgggaggtaggtggtaccaacccactttacagatgagggaactgagctttggagtgagcaatctcatagccagttggtaacagaaccaggtctggagttggccccctgactcctatctcctgagttcaccctgattgctgggagctggaggagcttttggcactgggggcagattgttttctccaaatgaggcaggcatgggaccaggacaagccaggtctcctctcctcttgcccaccctactcactcaggctaatacctcctatcctgctgtatctagtcttaaaaatgggtctctgtcccctcagggggatcctctggcctctccaaccttagctgctcttctaggaaagtgggccaaagaaaatttctggtttggtttgcatgtgtcccccaaagttcatgtattggcaacttaatctccaatgaaacaatgttgagaggtgggacctttaagaggtgattatgtaatgaatggattactctgccctcatgaatggattaatgccattatcacaggaatggattcctgatacaatgatgagtttggtcccctttcccttcctctctcatgctctcttgtccctccacttctgctgcaggatgacacagcaagaaggccctcaccagatgctgagcagatgccggcaccatgcctgtggacttcccagcctccagaactgtgagccaaataaatttctttatacatttcccagtctcaggtattctgttagcggcacaaaacagtaaataccttccatgaggcggcaggcaagtaggcccctggcccagatgaggaggcttccttttctcagtggggtagctctcaaatctcccatgcagggtgggggcgaattcctccagacaagcttcagggccttggccttgcctcagttaggggaaggggcctgattagaggtctttcagtgagaggtgatgagcggagccaggctggcccctgacccctgcctgtagccaggttgcctccctgcaccaggcaccttctcctccttagcagactcacctggggatccattctttaagccccaaaggagaaaagtcagggccctgaggaagaggggcaccaactgcctgattctgaagagtctgccctgatctgcctgagcctggggtctgactttgggaagtttgggcatcaggtccctgttatgagttgtggctggagggcttcagcctcctctagtctccttcagttggccccacctctggcaggccaggggctacagggaaggaagagcccatttaatcagctcctgccctggccaggtccctcatttggggtgttatatgccatatcttgtttaaacctcgcaaccccttgcaaggtagcgaatatcaagcccatgttacagatgaagaaactgaggctcagagaggtcgtccttagtcaaggctcagtactagtaagtggcaggtttgggacttgaaataaagcgtggttctgttccctacacttttttttcctgtaagatgcttggcctgggcacaggtgggtggtagtcccttgacccctgcaggactgtgacatgggaagggacactctattctgagtccatgggggcagggatcatcaggttgaatgaatgcgtgactgaattaaagcacttgctgtgctgtttaattttaagagagaaggggccttactgagaatccactggcctgacagtctgaaggccttggcgtggagcccaccctccatggccttgctgtgtgatcttggtcagggcctgcctctttatgggtctaatgtacaggaaggagaggtggaaactatttgctagatgggccttcaggctgggcatcctagccttaagaaactaggctgcagacccaatgacctcaggctgtaggcagtgggaaatctggcaagaggcatgatacggctcctgcgtgtgtgttgtgtgggaggggcagacgagaggccctcagggttcggcgccccagaaagccaggaggcctcaggcccctggtggacacagaagcaacccagctgtataaccctagcccctctcccacccatacacaaattattgggttccaggggctttttggtctttgaatgaagcttttggagaagtctgtccttctctatccatgactaggctggggccctgcacaggatctgtggactggtggctctctggcctctcctggttatgggactggcccagcagcttcaggctgcttggtctggccaggttcagcctgcactgcccagagccacaaggtggcacccaagcaccacatgtgtccaaggccacccgggctcatgtcttgctggagggactgtgcctgaggaaggtgcagcctgtgcctgtgggtaggtagtttgaggtacctcatcctcagacatcactggtgcacccctctgccccagccataggactgtctgtggggccatgctggtgtcagggcctgaggcaggagacctgggatctggttctggccctgtgtggtcctggcaagttgcttcctgtctttgagcctcagagtgctcttctgaaaaatgggcataaaaatagcactgacatcttcgttcattgattcactcagtcagcacatgtttattgagcacttactaggctagggtgtaacatacagctccaaacaagtgaagcctcgcagcggtgttcagaggattagatgaagtgatacctataatttatttagcacaattactaacatacattatggactctatataaatattagctaaaaccttatgtctaatttttgtggttagtcctatgattatccctattttagggaagaggaaacagggaaaggtattgcccatggccacacagccaggaagtagcagagctgggattgaatctgggctgcctgactctaaaccccactctgctggttcccacatttaatctggggctgtgtgtggctcctctgagctccctttaatattctccagaggaccttggatcaacttgggtcacttcctcaggccttccccatctgaatgctcagcctcctcctcccccagagtccccgactcctgcaggtttggtcctggcagggactggctgggaaagtcagtggtcatcaagaagccaacagtgattcagggccgtaagaaggtcccaggcccagctccctcctgctaccacctggggttgagacccgctaggaaatggaggccagagccacctggccctggtcccatcccgaatgtccatcacacttagctgggaccactgagctcaggcctttcctaagggtctgtgagggggagaggggggagcattcgaggatttctctctcagagagaatgtgggcccccatctgattgaaagggagttgtgggacgcatcttgaagttgagtttccatagcaagctctctgtttctgctgaggcacaactgggctcctcagagcctcaacgatgctctcaacctgtcagggggtgccctagccgtatcctccactcctcccagcccatcctgggacactaggtgggacttagtcacagccggggccgaaaactatatgcctgaagacgggctcaggtgggtgaatggcctctgtgaactgcagtgggactgggggcccatcatcatattgacaaccagacatctctgcaccttcaggcatgcagtgctcggccctggctgtgactaagtcccacctagtgtcccaggatgggctgggaggagtagaggatagggctagggcaccccctgccaggttgagagcatcgtcgaggctctggggagcccagttgtgcctcagaccgccaggctgcagctgagggttgtaccagccccagcggtgacagcagcgtatccatggtgtgcctgggcaacctggagaaagctctgtgccccccaagggctggaaaagtttcggccaccgtggagaaagctgtgggccgcatgggaaaaagttgtagctcctcaaacttttctcactgtgagcttatggctctctgtccctgaggtcagctgagtgatttgccaacaattaggccataatgagctggacctcagtggcctgggagtctcccaggggtacttgggctcaacaggacacctggggcccagttacagcagcctgagctgatgccaggtccagctgcgacctgagccccaaggatatgggcctgccccatgtgaccactttgcttgcatggccaaacttttaatgagtgaaaatggctacttctcttacttgctggtagcccaggcatgccacctgggtcctgcctgctcactccttaaagaaccagcaatttctaaaatatgacttgctgcagtttaagtgatcagctaatcaacaggttatgtggggtctagacgctgccccactgtgtgaccctggactgagccccaggcctctctcagtcttagttttcagcgataataatcacaggcttggcgtgaggcccagatgaaaataacacaaactgtaaagtgatggttcctttcaaatgatcattattgtccttaattattgcatcatattagcctggccaggaccttgactctgaccctcactcctggtgaatgagagccagctctgacctgggtgctcagaggcagctgcgtggcccctcctggctctgctggccactggcctgccctctgctccaggctgggctggcctagcaaccacactgtttataggtctctcttggctcaactatcttttttttctcctgctctgttaacaccctaggcctgcagacgggcaccactgagagtgttaagagccctgatattatcaagtccagtccttactgcatagatgggaaacaaaagcccagggagaagcagggtctgagctggaactccttcctttcccggggcttagtcacaagaaggcttcatgcgtatgcagtactttagtgtcgtctggccttctcggcagccctgtgagggtaggtaggctggcacccatctgtccactcacttactaagcttgcagattctaaagccagactgactgggtggacattctgtctccactatttactaggcatgtctctgtgcctcagtttcctcaaatgggaaaacactagtaattacatcatatgattgttgtgttaaatgagttagaatctatatgaaatgtatagaacatggcctagtgcaggctctcaataattaatatcagctatccttctggttatgattcagtcattcagtcagcaaacatttattgagctcctactgtgtgctgagcttggtagtgctagaacctggggatatagcagtgaagaagactgatttttggaactcagttttgtgaaggtgagggagacagacacatgaagccataatttcaagaccaaggatttggcaggctgaggtggggtataagcaggggaatacagtggaggggccttgatcccttctagggggagggaggcacagtcagggaagtcttctcagaggaggcagaagcagaagtaggcattgggccctgtgcaaagtgctttatatccaggatgttagtctatcctcacacaaacctgtgaggtagatgaggcgctctttttactgaagaggaaactgatggttatttgtctaaggtcactcagccagtaaattattaggtcagggtccaatccagggttgtctaaccccaaattttgtcccttttctttttctatgagggtgtttgtggcggtggttatgatggacagatgggggaggaggtcctacgcagacaggaggcactcacaggaaattctggctttgctgatgagggtgcaaacctggggtttcctttccgtggctggtacagaggcaggataccacagtgggtaccaggacaggccctgcccctggctgcctgggttccaactcacttactattagtgtggtctagagcaagtcacttaactgctctgtgcctcagtttcctcctctgtgcaatggggataatgataatggcaagcacttgcgtagcacttgtaagggctttcttttaaggattttacatctattactcataggatcctcagattctgtgtcttttttcctcagatggccataatacctgggtagctttaaggaataaattagttaatatacggaaggcacttagaacagtgcttggcacataggcaacgctcagtaaatgttagttattcttattcagcaccacagagtggagtcccaggaggctacagacagaattcctaaaaataatgaagatgattatgataacactagcaacaataaaacatgccctcatagttttacagcactttttaggatacaaagactcccacagctattgtttcatctgagactgaggagacaagtgtgtctaaaagtgtacacagaaaacactttttaaaaagacattcttattagcatcctgtgggatgtcttttttaaaagtgttctctgttcaaataagtttggaaaacactgaatcaaaccaagttaaacacttttcttcttggagagactcaagctcactaaacgttgtcagaccccacaaaagcagagggaagtacaacatgcagtgtttccccaaattattgggccatgaaatcctttgttctgaggagttgtgactcctggaagacactttctcaaacactggggtaggccgggcgtggtggctcatgcctataattctagtgctttgggaggctaagtgggaggatcacttgagaccaggactttgagaccagcctgggcaacatagagagaccctgtctgtaccaaaaataattaaaaaagagaaaacactggggtaaagagctttggctttgtcactggctgtgtgccttcaggtcaagtcatatgaatctaggcctcagttttcccatatgtaaaatgggaataaacgtacactcatgatggggccatcagtgttgtaagaactaaatgaggtcactggagtaacgtacacagcctaattcctggcaaatggacaataaacgttagattattatcgccgtgacacccctatgaaataacaccattattttccccacccagatggggagctcagtaggtagctccggggcccttcactttagtgtgtcagtggagcaccctcacatcccaggctgggcgccagagggcgactggctctttcccttccctccccattcccttttaaagatggatgaggcctcggttcaatgagggccccaggcaggggacggccacacccaggtttttggaggggccggggagggcgcgttcggggatggcactgggagtgggcagggctgacgcccctttgcccccagcccggtcttcctctacggcgacttcgccgcggggcagtgcggggaggcgctcagtgtagagctcgtgggggcctccgctgacagcggggcagggactgggagaagggcggcggcggagcaggtcgcgggctggtgcggggcctgggggcactgccgagcctacactgcggcggccgcggcggcggcggcagcgcgacaagttgccatggcccggctgccgcagctgccctcccaagggtctcgttagctctgcttggccggccaccgccgactcggccctagggaccccggcgacctagcaaacagccgatccgccgggcgctgacgaggctcgggggaagagggcggcagtccagatggcgcgcaagtgagtgccaggccgcgaggatttgccgccgggacccagggcgcactagctaggtgcgccgcccacccgcggcctcacgggggcgcccgagtccactgaatgagcccggcggggccgacagcagcagtcgagcgcgggtgcgccactctgaccgccgctcgctggtctcattgccggggcctgagcgggggctggggtgggtgccaacgaggaaagcacagttgatctgcaagttagtgggcggggagccagtagggagggactgcggagccgcgctggtcctgattcttcctcactcagctattttaatagcaatgaaatcttgaaggagtgctctgaggctgatagagctgtaggaaaaggtcttgggcgttcagatttttggatgcttcgtatttttcaactttattatctggcaacagtctttaaaactcaatgaccaattccagttctagccttaaacccaattaatccttaactatgaaagcagcatcctaaagtctactttcacttgttagcggcatctgtggaagtagccgagggtctcaggcagtgcagtagctctctgaatagcctctctttcctgagaaagggagcctcagctgctgtgcccaccaggcctggtgggagcgtgcgctcactgcgtaatagagcagggctgtgcttgtgaggtccctttggcccaaactgtgcaggatctgctgcctgcctttcctttttgttgtatcgttattgctttggcccagaaagctctgatgctacctgcctgcaaatagctcatctttactcaatacccgggtcctcacccctttatactgtgccccctctggactgtgatgcctgatgcttgtgtggtcagattgcattgacaagagatctcttccttgtcttataagggcactaatcccatcaggagggtcccaccctcttgacctagtctaaacctaattacctcccaaaggccccacctcctaatacctcattgggggttctggcttcagcataggaatttgggggggcacagaagactttaatccacaagagatgggttcctgacagtagtaaccactccccatccacccctgagtgctggtagtcagggtcacgttagactggagtggtatagagaagacttcaccactctgtagaaaaaggcaagaagtcttaactgaaagggaagtttctggtccctttttcaaaattacctccctggctctttaaaatgctgtattttataaaatgttttcgatttccctttcagatgtgcaggccaacctcaaggtgtgggttgcttagattacaaaggaacttgaattctttcatgtttttgtttaaagtatcactatcatcatctaaagccaagattggctgctttgaggaccttttctgaaccgtgtactaggataataactctgaaggagactgttcttggaaaaggctgatgttgggaccttgctagccattttggaattagggaatgaggtgtattggcatgagcagcagcacttttgtggctgtcaggcagagattttcttttcttttttcctttataagtcacccaacccaaattgttatcaggcagatatttttataggggtagtgggaggcagttcccaagtcccctgtccctctctgcacctagtctaccctctaagattgcaaccatcatagcatcttcttacacattacaatgcagtaaacttgggcacattgagcaccagtcatggccgctgtgttcctgaaggtacagaagtggcactggggccaggctgctgtctggaaaatgttagccactttggtggtactgcccttccgacaccgcctcctcacctcccccacccctacacacaaaaaacaagacaagtagagcaaacaaaccacttctccaggtagacagacctgcaggtctgctcatggtgaccctctctttagcctgcattgtttccaaggccttcagctggcctattgtttgctaagggcccacaccttggcaggagctgaaaagagaggatttccttttgctcaggggaggagggtctgtcctgggtttgcagagataggcttcttgtctatgctgctgaagaaaacaaactagacaggagtcagatgtgggctctaccttcttgctcagtctctaattcactgtggccttgggcagatcagttctccatccttattagtatcttgggtggaatactccttaaggaatctttcaagtattgagtgcccccatgcccccaccaccttccacaaccaggcctaggtgaggcaggaaggaagaaaagaaagtctgggtgcagagtgtgtagtatgcctcacagtacagcctgcaggaaggccttggataagaaaggctgagtgatattccagggggtgggacagaacagagtgtggtttgggtgggaagatgacctggtgaacctcaggttctctcaaggctttacagaggtgggagcagggccatgggtaggctggctacagtatccctgctgaaagggaatacttgttggtacaaactcagctcttggggcaaggatcatatgaacttgcggtcatgaaagtgtaagtagggtagaaatatgaggaagggagaggcacttggtcatggccaaggctggagtgtcattaatgtgtgggggttgaggaagcaggtcacaggattgttggatggctcattctacagtcttgtgccctgggagcccctcatgtgggagacaggtggtggatgtcaggaagagctagaggtgggaagggtaggcttgatatttagactatgtgtcaagtagggcagggccagttactgaaataccgaaacactagttgtcatttggaaatggctgaggccccaggctccctgaggcccccagccaccttgtccttggaaccttgctggtgctcactggcccatacactgtctgcccagtgtattccctgggctctgaccccagtccctatgtgtcctcttgaccagggtatgcacctggacgtcagtgggaattcacttccccaggggaagtgctggaatccccatatacacttctggctcctgaggctgtgtctgctggatggtgcctccccagtgtcactgtcccgtggtggcttgtgggaaccctgcctgcactgtgaacggtatcggtcgttatgtatgctgacaatcacccctggtaaaggaaggggacagtagggtgaagaattctgttttgggtgcctggccgctttgcagcggggacagagggcaagacctggcaggcctgcagtcttcctcggctatcgtgaagagggttgtgagtgccaaatccatcccatagggagatcccagaggagactctggcaccccctctgccagagggcaggcccatgagtgcggccctgcagaccaacagtttcttaccctccttccttcgcgagacctggcacagctgcctgcctcactcctgggagccgagtcctactgggagctcgttcctgccaaggctgggatccagtccccctctcccctctgtgggcacttggcaggccgaggtccctgcttccctctgccagttcctgccaaagctaatctccctgcggcctgttcctggcagtggttgcacgtgggtatctctgctgggcaggcctgcttccatcactggcacggaccccatttcccaagaatcctttttgggtggcacaatcccaggcagaattctcccaggaggttcctgagtgcctcccttgctggttcagcacctgatcacgttcctggattccccctgaactcctccagtgtctgcaggatgcttttcagttcacaaagcactttcatattatatctcattagatgctcagcagcccctcaaacagcaagtggtgcccttgagcctgcagggccctggagtgggcagatttcctgaaccatctgctctgactctgcctttgggccagtggagaggcctttgtgagaccaaatcttcaggttctcggtggggcaggtggcagttcagtaggaggtggcctcgggcctcctcttctggggaaggtgtcagagaggggtcaggagactatgtagcctcttgtggccccagtcccctgatcaaaaaccaataggaaaagtctcttagaagagaaacagcttttgggttaatctgtaggggcagtgagaaagggttggggaggttggggcccagctgggccacgtggattcgatcttggcttagagtgggcacaggaagctatgtgatgaaggggagcccctagggaggaatctgggtacaggggatggggctggaatcagctacctggtccgtaagttgtgttgttaaatttggagaaaaactgttttccaaaaatggaggtaaattgaagtttgtaagagctggtgaataagccatgcctccttggtggtttggagcaagacgttttccacgcaggccatttcatcaagactcagtggtaatttgggattgcctcagctctcccagctcggctgcctgttgctgtcagtgggtctggggggcctcagggctgcagaggcttggtggtgtgggagtccttcacctgagggctgacgtgccttttgggggtctggagcatacttccaggagacaacctctcttcctcctgtcacctctgctcctccctcagcctccctgtgttcctttaagcagggggcatgggaagaatttcttctgaagcaactgatgttctaaatttgagagaggggaataccatcatgtggcctgaagttagcagcccagaggctgagggctgtggctctggcaggtgctggtgtccagggtgcaaggaagactccaatgtccagaggactctcatgaaggtgactgggagcagactgtggtggaggtgacagctcagggaggaagatgggattgtcaggactcagttctttgctggaagagacttctcttccatggggtggtgagtccaagtgagaccttggttcctcttcctgggtagaatcctcccttccattggaattatcctaaaggtccaccccactgactcctagcggcctctttcctggtaaggaagtctgattggcttttggcttggctaacctgagtcacttcttccagagctgtcctcatgctgcagccactgctgtcccacagcagctgtgggtcatccttcagctacagatcctcccattttccttgtccccccatcagtgtgcgtgcacacttctgtgtatgcaggtttggggtaggcttggtctgcaactgcgggggccatgcgcagttgagttcagtctggtcatgccacagaattatttacactgaaaccctaaaaccctctagcgaaaggttagatctttaagtcagacttgtttggcaggtcagtgagatgacagggaggtttaagacctgaattgggggatggggcacaaaggagtcgtggctgtttctggatctaaggcctctgtagggaggtgagatccagactgggtagaggctggtgattcttctggagccaactctgtgccaggccctattgtggctgtggaggagcatagttaaaactctgtgctttccaggacttgaagtctgtgcactgcccttactacgataaacaaaggaatgaaagttcctctcccaggtccatgattcagagggctcttaggggtatgtgtgtaggaggcggtttgctgctcatgcagacatttggagaaactctggttccatctcgtcacccccacaccagcatccaggaagacatatgggcagactggtgcgggccagcaggtgtggggatgcttctttgctgtgagcttctgccaggtgttagagagggaaatcgaagtgtccagctgccccagagctgggagtccttcagatttaccagaactttctgattacaaagacttcctgcttattgttttgattcttaggattataatcttacttttgctttccatgctcacatccccagtctgaatctggggctgcttctcaccactgccagcctcaaggcagagaaggcaggctcctctcccatttgtgttccctctaaatggttgcataggtactcgcttgcagaaccattactaccaatagtggaaaaatgagatggggagggcaatatacttttattcttattttatttgagacaggttctcattatgtcacccacacccatgctggagtgcattggtgtgatcacagctcctgggctcaggtgttcctcttgcctcaggcaatttttaaaaaatttcacacttgattggccaagaacctcccctccgacccccacaacaacctacccagcatttactcctcagtctgaggacacgtccctcacatcagcccctctgctgtcttgaaaggctcacctcctggaagctggctcctccctgattcagggcccagcacagcgtcggaaaaatggagcagtgctgcccactgtgttcgaaggcctccctcctctgttttattctgggccccttgggcagggcttacatcagagccagtcctccttggctgattcaaagggacaaactcctgggtcagtcctgaggacaaggaatagtgagtgggtgagggaggggctggcaacaactggagtgtgtctggccacaagctagactgtggctgcagctgatggccatcatcaagctggcgccaaagctgccctcctgcccaggtttccagagattctctagctagttctcttctctgttctttggaagatttactgccttattccaccgctttagtggttatcctacaatttcctacatttttctttgacttaaataagtaaaatctttactccttttcctgagccattcaaggaacttgggttattttaactttactttcctcctgccttacatgattttcttttaaaaacttaattttatttataattccagagttatagaaaatttgtaacagttggtgtacagtatttccatatatcccctctcaagttccatatatattaatatttaactacatataccttataattctttccctccccaacatcatttttttctgaactatttgatactgatctacatatatgtgctgtgttacccctaaatatatccttgtgtatttcccaagatataaaaatattctcataaaattatcacacagttatcaaaagcaggtaattaagaagacacaatgctatactctaatttacaaaccttattcaaatttcaccgaatgtcttagttatgtctttatagccagagaaggaaaaaaatacatatttttcttgtctaggatttagtctagaatcatgttacatttagtcatttctagtcttctttaagccgatttctcttggtctttctttcacttttcttttttgaggggtacaggacaattattttgtagaatgaccttatttgggtttgtctgatgtttcctcatgattagattccagttatgtatttctggcagaaatgccacagaagtgatattgtgtccttctcagtgcattgttatcaggaggcacatgatgttggtttttgtcccactgctggagataataactttggtcacttggataaggtggtgtctgccaggctttgtctgccattgcaaagttaatattttcatttggtaattaagctttgggaaatactttgagatgatataaatattctgtttctcatcagactttacccactaaattttagcatcctttgatgattagtgtttgaggtataatggttgtaaaatggtgaattttctgcttccattatttctcatacatttattagttgttactctactgtaaggaagagtttacctccctccctcccaatccatccatccatccatccatccatccatccatccatccatccacccgcccatccatccatctacctacccacccatcttccattcagtcagtctggattcatagatatttattttatttaattagttatgctttgttactagcattggtgattttgatgatcaaaattatcccagattagtcctgtgagagctcctccaagttgattcttgtgtctttttgacacactgctattactttttgagcacttccttactttctgttactacaagatattccaggctcatcttgtactttcccggctcaaactctgtaatctggtatttttctaagaaaccctgattccttttagcagagaattgtgtataaaaacaaaccaagacctggaataggtctgttcattgccagagtgttgttatttttaggccctgtcatacatatacacacatgtgtgtgtagtatatatattatgtaaatatgcacacacacacatgcaaatccattcatctatctacctacctacttacctacctatctttcttaaaaaccatgagttcatactgatatgaccagttccaatccaacactctagagttcattttaaccttctctctttccatatatgtaatttccttctccaaccgtgaaaaacctggtttcagttacccacagtatatttacttatttgcttaatcctagaatacacagaatgtagtttcagaattgttaactcatgctggtgtgggaaacaaatctattaaacagagttcaatatttgctactgtctttttgccctagcctgagaatacagaggcaaagtactgcttcaaaacttctgttatcaccccctacccgtactgtgttttgtcattcacttaacctacagttcggtacacttgcttccatatgtattcaatgctaatgtttcctccttttatccttgttgattgtatttactgaaaaactgagtacatgaaacattaacatggttgtaaaagtcagaacagatctgtacaaaaacatgaactcagagaagtgtcactgccctccatcttctctaccttgctcccaccatcttattcttttcacccatcaggctaaaaaaagacatcagagaaaaatatatcctaatatgttgagtttattcgggagtaagcaaaaggattataatctgggaagcacagctgtagcaagccataggtacaggtacatcaagccaaaggtaaagggaaatttttactggcaaggagaagctatgtaagctgcttggagacagagttcattggttctggaggctcaaagctagaattagcatcagttcattggtggagatgccactgctaggcatcggcctagcatcttatcagaattgctacagtcctaaagaatgtatagtgataaacctggtcatagaaatatgtgcatgcatgtaaaatgtaaaatgcatgtaaaatgtagatcatgaaaagcatgagatgtataaaagatgaaggaatttctcgtggagttattttagaaagtccttgaaatagtccttatctcagatgtgcaagcatgagctgtgctcctttgtgtgttctggctccagtttgctcgggtctgacaaaagtgacttattttgctatctgcaactttagtcactccatttccacccactcctgtatggaaccaatctcattagtttctgggtttcctttcctaagtttctttttgtatagttgtgcagacaaatatatattttcttattcccctttctttcttgcacaaaacgtggcataccataaacactttctcacactttgctttttaaatttaacagcatatcttgggagccattctatatcagtttatagatgtcatcctcattcatttttatagctgcagactattccattcgatgatgtaccatagttcattcaaccattttcctatgtaaagtcattttggttgtttctaatatttttcaattataaacaatgctacaatgaaaatccttaaacatatgtatttttgtatatatttgaatatgtattaccaggataaattataaaaagggggaaaagcatgtgccattttgtttgatatcatcaaattctcccccattaaggttgtactaatttccattcccatcagaaatgcttgagcatctactttcttcaagccttgccaacagaacgtgttagtgtatgtttacatttttgccaatctgctaggtgagagataatatctcagtgttattttaatttgcatttctcttattatagttgaggctgaatgttttttcacatgtttacgggacattttaattcttttttcagtcaatggtctgtttatgtctttgactatttgaccatttttatatcaggtttttgaaacttctatcgagtagaaaaagttatttatatattagcgatattacatatgtatctgtgttatatattaccgatcttttctctcagtgtttaatttattttgggatttttttttttttttctgcgacagagtcttgctctgttgcccaggctagagggtagtggtacaggctcggctcactgcaacctccccctcccaggttcaagcgattctcctgcctcagtcttctgagtagctgggattacaggtgcccgccaccacgcccggctaatttttgaatttttagtagagacggggtttcaccacgttggccaggctggtcttaaactcctgacttcaggtgatctgcctaccttggcctcccaatgtgctgggattacaggcgtgagccacagcacccggccaggacttttcttttttctttttttttttgaataaaataattttatttttgtataataaaataattttatttttgtataataaaataattttatttttatataatacaatttatcagtcttttattgttttggatgagttcacttccattaaatccagggaagtgaaattatatatgtgaccttaatatgagttttaataatctacttttcaatttttcagtattttaaatatttctttaatgttctggaaaaaatagccactagcaaatacagaaatacgtgtacacaggggcacacatttttccttttgtctctgtctccagtacgtctcagggcagcactgagcagaggcctatgggccatctcagtctttcattagagccagtagccaaaacatatctgtccaagagctatgacaacagcagcaaagcttgtggaagcctcagccaacttagtcctagagtttccaccaaactgaatggttccccatagtgaacactgttttactgagagaaaacagtcagcgcttcttggttatccacctccctaagagttataatagcgatagaaaaatatgagaaaacttcaacttcagtagatttagttctgacgcctccgctaaacttagtggttccccatgctctgcggacgcttatattcacagaatatcctcaccactttttgctagttgcctaccctctgtgacatatcgttgcctcccccttcgcatatcactgtccagtgtggcaatactctacacacagccacctccttcttttaaaggaggtggctttacctctgttaagggactatcatgctctttcagatctttttttaaatttttattttttaaccttttaaaaatttcaatagtttttggggaacaggtgatttttggttacatggataagttcttcagtgataattactgagatgcagccatcacctgagcagtgtacattgtacccaatgtgtagtcttttatccctcgtccccctcccaacttcccccttgtctccaccgtcccttttatcattcttacacttttgcgtccttgtagcttagctctcacttataaatgagaactacaatatttggttttccattcctgaatttcttcacttagaataatggtctccaattccatacaagttgctgcaaatgccattattttgttccttttaatggttgagtagtatttcactatatatatatatatatatctcacatatatatcacatatatatgtgtatataaatgtgatatatatatgtatacacacactacatttttaaaatccactttttggttgatgggcatttaggctggccccatatttttgcaattgcaaattgttttgctataaacatatgtgcaagtgtctttttcatataatgaactcttttcctctgggtagatactcaatagtgggattgctggatcaaatggtagttgtactgttagttctttgaggaatctccatactgttttccatactggttgtactagtttacattcccaccagcagtgtagaagtgttccctgttcactgtatccacactaacatctacggtttttttgatttttttattatggccattcttgcaggagtaagggggtatctcattgtggttttaatttgcagttccctgatgattagtgatgttgagcagttttcatatgtttgttggccatttgtacatcttcttttgagaattgtctattcatgtcctttgcccactttttgatgggattattttttttttcttgctgatttgtttgaattccttgtcgattctggatattagtcctttgtatgatgcatagtttgcaaatactttctcccgtcctgtgggttgtctgtttactctgctgattatttcttttgctgtgcagaagctttttagtttaattaggtcccatctatttttgtttttattgcacttgcttttgggttcttgttcatgaactctttgcctaagccaatgtctagaagagttttactgatgttatcttttataatttttatagttccaagtcttagatttaagtctctgatccatcttgagttgatttttgtataaggtgagagatgaggatccagtttctttcttctagatggtgtccttttcccactttatgtttttgtttactttgtcaaggatcagttggctttaagtatttgagtttatttctgcgttctctattctgttccattggtctacatgccaatttttataccagtgccatgctgttttggtaactatagctttatagtagaatttgaagttgggtaatatgcctgcagatttattctttttgcttagtcttgctttggctatgtggtgtctttttttgttccatattaattttaggattattttttctagttctgtgaagaatgatgatggtactttgatgggaattgcattgaatctgtagatcccttttggcagtatggtcattttcactatattgattccacccacccatgatcttgggatgtgtttccatttgtttgtgttgtcaatgatttctttcagcagtgttttgtagttttccttttagagatttttcacctccttggttaggtatattcccaagtattttattttttggacacccctcatttaattgtttgtagatggttcatacctaaaaagaaaaactacaagttgccaattatgttatactatcacagacttgaatttacctttaagcttctcaaagaaatgaaatctgttcagatggctaaattgcctttgtccagacatgccagccaacaaaagataaaaaacaaatacttgtcctgatggtgggtatgattttgggttggcccatgattttgaaatgctttaaaaaaaaaggacattttctgactgttacaggaatccttataaaatggatagcaaattaaggaaccctgagaagttttccattacctaaagaaatggccatgataaatgtagaatttagcaaaagtgcttcatgatattacccataatacaagagataaatctgccatgatttttattttattttttattttttgacttttattttaagttcaggggtatatgtataggtttgctacataggtcaactcatgccacaggggttgttgtacagattattttgtcacccaggtattaagcctggtatccattagttattttgtcttatcctcaccctcctcccaccctgcactttctggcgggcctcagtgtctgttgttcccctctctgtgtccatgtgttcttataatttagctcccatttacaagtgagaacatgtggtatttggttttctgttcctgtgttagtttgctaaggataatggcctccagctccatccgtgttcctgcaaaggacatgaccttgttcttttttatttgtcatgatattgaaccaacattgatgggggtaattttaggaggtttcatagacatttccaaaatatgtccaacctgacaatgacacaatcctggcaagattttaaggataggtcatggacaggaaccgaagtctcactgcccctttgaacgtctccaaatgtgctgagtgcattctgattattgttgtttattcttagggttagttgatgttttaccttactggagagtggtagctatagtggtaggaacaaatttgcttaattttgttgtatttctgacttggaaaatcccaacttattttgcagttaagaggaacacacatatcactggtactgttgttactgaaccctgcaatgctttactttttactcagaatctctactgacctttatcatccacaaaattcagggaaaagatagaactaaaattctaaaagtataattatcagagctctcaaaaccctcacactcctaaggcttgaggagtgctattggtgttgatggaagtaagaccaattttcaggacctacaggtggccacctttggaattcataacaggcttcctcactacttgcaatcctagattctacattatgagtacaagctgatatgattcattgctgaagggtactcacaataactccagctttatcaccaacaggtaaacgctgcatttctacaacagccacctgtgcaggccctgcatgctctgtaacctggggatttggtcttctgaaaagggcaccagagaaaaactgctcttaagcctctgttaactgacacagcagtagaactccaaggtgttgatccttggattcatgtttctcaacttcagagacacacatcactccttcctgaccactgggcatccatcccaccaggagctcctaatctgagagctgttagaaatcctccaaaagtgctgactgcagaagttggtagcttctgctcaagatgacagaacaagattaacttttgtattcttcagcaccttttttattttccattatcacactttgataccctctaaaacattaaaacaccttctagaatgcttatgtgatcaacttgatctttgtcttattaattttgacctctgtcatctccttctaccacttaagaaaaaaccaaaactcccttgtgcatctttttcaaaccacagctactgccctgaatttaactaattactgacaaaatctagtaagtatcacttcagacacttcagaaggaagtacaggccctttctagtacttaagtttgccttacaccacaaatcccaaccttcagtcctgtaaaaactggagcttgatgtcacatcaatggaatgcttctgacaatgtcatcacaatcctttcagcacaacctgggtgtcatgagtgagcactgacataggactatccttgctacagctaccactctgttctcttcagagacactctggcttgcttctcaaaaactgtttaactctactcaagaacagcccacaaaaaatcctgacccatagctgttgtgctaaaatgaactttctgtttccatacaatctgtgccccactaagatgctaccaaagcagacatcaggcttacactgcctgctgtaatataggaagtagatgtttccacatcaataaatattcctttcatacgctgctaatgtattcatgcagcccattagatagatgtactaaaacgaagttagccagttttaaatataattttgtatttatgtgctcttttaatttattcatattaaaacagacatgatcattatcttttaatatacattttacaacttgtatggttattttttgagaataagctgacagatttggattgatgggtaaaatgtaagcatatacgttaaagggtttaaaaaaatctgtaatgctaaactattatccagtgaggttttattggtctataatcccaacaacagcctacccattgtcagcttgctcacacccatgccagcactggaattagctagccttttcatcttcgctggagcgggaggtgatccagtagaaaaaaatggcaccattttttccctagttagaaattcttgggttactggtaaaggtgaactttccttctgttgttcggctggactctagacaggagctggtgtgaggcaatttaaaatgctgctttccagagaggcctggagagactgttctctgtgctgtagagggagctgttcatgagaagagggagcctgaaagggcgttgtcattgttgttctctcctgctaccccatgcctcacagaaaggtccacaggccaggaacagggaaaggggttcctgtgtttatgccacttgtagacggcacaatacaaacctggctgcagaaagagaaaaagagaaggttatcatcagacacagtgaataatgggaaataatttcagagaatcagaaaactgttaactagaaagtgaggctgaggaagtgacctacgagaaatggacaaggactcgatttacacagtaacgagagggacagagagagaaacccagagaacaggcagtggctggcacagaggcggcagggctgagaggaatggagtgagtgtctcccagacagtgagctctgagctgcactatccagagcacaggggaacgccagagcgaagagccccacctcctcaaggaggcagaggctttccacattttctctaaactctccttccctcccaaataaaatggccctgtctgtcccatggcctctgcctcaactacaaaaatatctgtccccctgggggtggggaaggagagatgtgtcaataccagggaatggctccagtgagggcaaggaggcctcgctgggcaggcgggggactaccagcatccatctgagcagccccactctcagcatccaggacgacacagaggaaacacaaaagcttatgtcccagaatcctggagggatgtgggcagga

SEQ ID NO: 2 - protein, 792 aa, Homo sapiens
MHVIKRDGRQERVMFDKITSRIQKLCYGLNMDFVDPAQITMKVIQGLYSGVTTVELDTLAAETAATLTTKHPDYAILAARIAVSNLHKETKKVFSDVMEDLYNYINPHNGKHSPMVAKSTLDIVLANKDRLNSAIIYDRDFSYNYFGFKTLERSYLLKINGKVAERPQHMLMRVSVGIHKEDIDAAIETYNLLSERWFTHASPTLFNAGTNRPQLSSCFLLSMKDDSIEGIYDTLKQCALISKSAGGIGVAVSCIRATGSYIAGTNGNSNGLVPMLRVYNNTARYVDQGGNKRPGAFAIYLEPWHLDIFEFLDLKKNTGKEEQRARDLFFALWIPDLFMKRVETNQDWSLMCPNECPGLDEVWGEEFEKLYASYEKQGRVRKVVKAQQLWYAIIESQTETGTPYMLYKDSCNRKSNQQNLGTIKCSNLCTEIVEYTSKDEVAVCNLASLALNMYVTSEHTYDFKKLAEVTKVVVRNLNKIIDINYYPVPEACLSNKRHRPIGIGVQGLADAFILMRYPFESAEAQLLNKQIFETIYYGALEASCDLAKEQGPYETYEGSPVSKGILQYDMWNVTPTDLWDWKVLKEKIAKYGIRNSLLIAPMPTASTAQILGNNESIEPYTSNIYTRRVLSGEFQIVNPHLLKDLTERGLWHEEMKNQIIACNGSIQSIPEIPDDLKQLYKTVWEISQKTVLKMAAERGAFIDQSQSLNIHIAEPNYGKLTSMHFYGWKQGLKTGMYYLRTRPAANPIQFTLNKEKLKDKEKVSKEEEEKERNTAAMVCSLENRDECLMCGS

SEQ ID NO: 3 - DNA, 3142 bp, Homo sapiens
ccctttgtgcgtcacgggtggcgggcgcgggaaggggatttggattgttgcgcctctgctctgaagaaagtgctgtctggctccaactccagttctttcccctgagcagcgcctggaacctaacccttcccactctgtcaccttctcgatcccgccggcgctttagagccgcagtccagtcttggatccttcagagcctcagccactagctgcgatgcatgtgatcaagcgagatggccgccaagaacgagtcatgtttgacaaaattacatctcgaatccagaagctttgttatggactcaatatggattttgttgatcctgctcagatcaccatgaaagtaatccaaggcttgtacagtggggtcaccacagtggaactagatactttggctgctgaaacagctgcaaccttgactactaagcaccctgactatgctatcctggcagccaggatcgctgtctctaacttgcacaaagaaacaaagaaagtgttcagtgatgtgatggaagacctctataactacataaatccacataatggcaaacactctcccatggtggccaagtcaacattggatattgttctggccaataaagatcgcctgaattctgctattatctatgaccgagatttctcttacaattacttcggctttaagacgctagagcggtcttatttgttgaagatcaatggaaaagtggctgaaagaccacaacatatgttgatgagagtatctgttgggatccacaaagaagacattgatgcagcaattgaaacatataatcttctttctgagaggtggtttactcatgcttcgcccactctcttcaatgctggtaccaaccgcccacaactttctagctgttttcttctgagtatgaaagatgacagcattgaaggcatttatgacactctaaagcaatgtgcattgatttctaagtctgctggaggaattggtgttgctgtgagttgtattcgggctactggcagctacattgctgggactaatggcaattccaatggccttgtaccgatgctgagagtatataacaacacagctcgatatgtggatcaaggtgggaacaagcgtcctggggcatttgctatttacctggagccttggcatttagacatctttgaattccttgatttaaagaagaacacaggaaaggaagagcagcgtgccagagatcttttctttgctctttggattccggatctcttcatgaaacgagtggagactaatcaggactggtctttgatgtgtccaaatgagtgtcctggtctggatgaggtttggggagaggaatttgagaaactatatgcaagttatgagaaacaaggtcgtgtccgcaaagttgtaaaagctcagcagctttggtatgccatcattgagtctcagacggaaacaggcaccccgtatatgctctacaaagattcctgtaatcgaaagagcaaccagcagaacctgggaaccatcaaatgcagcaacctgtgcacagaaatagtggagtacaccagcaaagatgaggttgctgtttgtaatttggcttccctggccctgaatatgtatgtcacatcagaacacacatacgactttaagaagttggctgaagtcactaaagtcgttgtccgaaacttgaataaaattattgatataaactactatcctgtaccagaggcatgcctatcaaataaacgccatcgccccattggaattggggtacaaggtctggcagatgcttttatcctgatgagatacccttttgagagtgcagaagcccagttactgaataagcagatctttgaaactatttattatggtgctctggaagccagctgtgaccttgccaaggagcagggcccatacgaaacctatgagggctctccagttagcaaaggaattcttcagtatgatatgtggaatgttactcctacagacctatgggactggaaggttctcaaggagaagattgcaaagtatggtataagaaacagtttacttattgccccgatgcctacagcttccactgctcagatcctggggaataatgagtccattgaaccttacaccagcaacatctatactcgcagagtcttgtcaggagaatttcagattgtaaatcctcacttattgaaagatcttaccgagcggggcctatggcatgaagagatgaaaaaccagattattgcatgcaatggctctattcagagcataccagaaattcctgatgacctgaagcaactttataaaactgtgtgggaaatctctcagaaaactgttctcaagatggcagctgagagaggtgctttcattgatcaaagccaatctttgaacatccacattgctgagcctaactatggcaaactcactagtatgcacttctacggctggaagcagggtttgaagactgggatgtattatttaaggacaagaccagcggctaatccaatccagttcactctaaataaggagaagctaaaagataaagaaaaggtatcaaaagaggaagaagagaaggagaggaacacagcagccatggtgtgctctttggagaatagagatgaatgtctgatgtgtggatcctgaggaaagacttggaagagaccagcatgtcttcagtagccaaactacttcttgagcatagataggtatagtgggtttgcttgaggtggtaaggctttgctggaccctgttgcaggcaaaaggagtaattgatttaaagtactgttaatgatgataatgattttttttttaaactcatatattgggattttcaccaaaataatgcttttgaaaaaaagaaaaaaaaaacggatatattgagaatcaaagtagaagttttaggaatgcaaaataagtcatcttgcatacagggagtggttaagtaaggtttcatcacccctttagcactgcttttctgaagacttcagttttgttaaggagatttagttttactgctttgactggtgggtctctagaagcaaaactgagtgataactcatgagaagtactgataggacctttatctggatatggtcctataggttattctgaaataaagataaacatttctaagtgattgtatgagattaattttgtcatttactttcatataaaagtcaaatttgaaaaaca

SEQ ID NO: 4 - DNA, 28077 bp, Mus musculus
tcaatatggcggccaagggactcgtgtgctgtctgtctactgctcagtttccgcccattcaactcccggcgttgaaacgtcaagaacgtcattcgaattccgtccgtcgcgttgctctgcacgtcacgggtggcgggagcgggaaggagttcgtaattcggttagtctgctctggtgaggaaagtgctgtctatcgcgcagcttccatccctccgtccgagcagcctctcggagtccaacccttcacatctgacagtcgtctctgtcccttcttcgcctcggagctgctaactggtctcgaacctctcagcacttcagcttctagcggcgatgcatgtgatcaagcgaggtgaggggtccgtggggatggggaggaggagaggggacccggctgcggagagcccagcggtcactatcgccggcccgcccgacccgcccgacccgcggcgcctcgccgcttcccgcgcttcccgccgcgcttcccgccctgtctgtcagctgggcctgtgtctgctcagtctgtccccattctcttgacctttgtgtgttccctttgactttgactttgtgctcccttccagactccctccaaccctgtctgagattgttcccgagcactgttattccttgccgccatcctcagaggtagctgcttttggctccatttttttagaagaggttgcaaagacacgaaaaagcaccccaacacccccattccaccccagctagtagttggtgaggttagaattgaaacccatagctcataatagccctgtgcctgtctttcctcatttcttaaacaaaataacagacaaaagaaccgcggagtcgatgatctggtgtaggaggaaataaggaaaaaaagaaaaggcaggacaccacattttttgaacatctgtcatttttctggtctcttctgaggtgggagtgtagtatcatctctcctgcctctgcatttttgtggggaggtttttttttttttttttttttttacattgtttgttcttgggacagggtttctctgactggcctggaacttactctgtgtagatcagtctagcctcaaactcacagagggctgcctcctctatcataggtcgatagacaaagacttttaacccaaatagacaaagacttaatccgagtagacatgattaaccactgagcagtctctgcagaccccaaagacaatctcttaattgttttaaacagttttaaaagctgaatatacttgattctttggtattgcccgcttaataactgctaatgctaactgtgatttgattatttagatggccgccaagagcgagttatgtttgacaaaattacatcacgaatccagaaactctgttatggactcaacatggactttgttgatcctgtaagtaaatacagtgtgtatcaggggttctttgcatgctatgtgattttatgtcacttacctctagcccttcacttaactatacttcagtgttaaatgtgaatttattgcctgacactttccttaattttgatgtgtccttcaagttctcatttcctggagaactcagaacatgaactaagaggggacagttgatgtgactactggtcaggcatcttgtttatccgtatttagccacacagtgtagaaattagttctatttaccgtcatctggaattaggagtgctgtgtatcttactcatttaacttttaagagtctctaacagttttatacatacatatgtaaaatacacttttgtcatactttcttcagtgacctcttatctccttcctacagccatcttctccataagtctcttagtgctttgtgtgagtgtgtgcatgtgtgtttatgtgtgtgtttgtgagtgtgtgtctgggtccctatctgtcccacttcatttacttagagttgttgtgtgaacattggtctggaattaatttacttgattgagcaagggcagcttaccagtgattgtgccactgagggttaagactcctccagcaaccattattggtctgcagagatctcctcagggaagggtagggccccatgaaccctgaatgctgatgggcccagtcttgtcgtgcagacagccactgcaactattttcatgagggttttttttttccccccctttggacttagtttatgtctctgtgagtgtctaccacatgtgtgcaggtacctgaaagggccagaagagggtattctacccatcttgtggagctagttcaaagcagctgggaatctcccgtgatgcatgttggaaaccaagtcaggtcctttggaagagcagtacacacttttaactgctgagctatctctctaaccctcatgaatacctcttattcttgggctagcctcagtgtgtcatttttctaactaggtacttaatacatgcttagtttaccagagtgaaaaaataattttataccttaaaatatatttattataattctacacattttggattttgagatagtaattaaaatagttgaatgttgatattgggatggatcttaagacctcatcctatttcgtctttattctgtagataagataggtctaaagagagagaggacactgcttaaattaacgttagtgcaatgggaaacaaatggagtaccttggtttttagacattctattgcctcatctaacagcacatgtccacatgcagggatgcattagtgggcttcagctttccagggtggatcctgttgaggacgtctgggtgctagtagatgtagcacatggatgctatactgttccaagtactacataacatcagaaactatgtgggcttgactgctttcatacttatctgctgagtcaagaacatgatatcagaagcaaactggcttagctatgttataataccagaggccccacccacactcagactacttttgacggagataggctttggccaactttccctgttaagctgtttttaagaaaaatttagtaaatatgtagatagaacttagagtttgtttttctttagaatgtatggtgggctgaggagatggctcagtggggaaagtgcttgctttgtgagtgtgagactctgagtttggatcccaacacccatgtggaaaagcccggtgtgcagcagtgtgtaatggcagctctgggcagctgaagaaagggccaggtcctaggtgtacagcaagatggcaagttctaagctcaggaagacactgtctcaaaggacaaggcagctgccacgagctcaggggaagcacctctttctgtgctgattcctggaccacgtgtgttatgtgcttgtgggttgcttttttttttttttttaaagatatttcctttataaacatttcaaatgctatcccgaaagttccctataccctccctccaccctgctcccctacccacccactcctgcttcttggccctggcattcccctgtactggggcatataaagtttgcaataccaaggggcctcttttcccaatgatggccggctaggccatcttctgctacatatgcagctagagacacgagctccggggtactggttagttcatattgttgttccacctatagggttgcagactccttcagctccttgggtgctttctctagcttctccattgggggccctgtgttccatcttatagatgactgtgagcatccacttctgtatttgccaggcactgagtcaagaacgagacagctataacagggtcccttcagcaaagtctttctggcatatgcaatagtgtctgggtttggtggctgattatgggatggatccccaggtggggtagtctctggatagtccatcctttcttcttagctccaaactttgtctctgtaactccttccatgggtattttgttccctattctaaggaggaatgaagtatccacacgttggtcttccttcttgattttcttgtgttttgcaaattgtatcttgggtgttctatgtttctgggctaatatccacttaccagtgagtgaatgtgggttgctttttgtcattgttgtgtttactttatgttttttctttattctttgaacatttatccttactcctgtgaaagaaaataattgtaatcagcttcaattaagacataacttacaaaaaacgattctagttttaggccagccaagggtacatagtgagagagtgtctggaaacaaaaccaaaaatcaacaaataccaaagctgtgttttatgctttgggtgctaatgctctttacatcttcagtgtctttttactgaaataaaaataaggagagcagttgaatcctgaaatcaactctggcctccacacgctcctgcgaggttgagtgtgcctacaccaatgtgtacccacacagtgtatggtagtgggagatgcctccgttgggagtgcttgtctcggaagcatgagggcattagtttatatccccaggactcgtgggaaaagtcaggtgtgagagtgggtgctggtgggaaggcagatacaggggctccccgaagttcactgactggttatcttgctcaaacagtatactccaggatcagtgagagaccctgcctcaaaaactaaagtaggatgggggttggagagatggctcagcagttaagagcactggctgctcttccagtggacttgcgtttagtgcccagtacccacacggcatctcacacctgtctgtaactccagtttcagggaatctgatatttctgctattctctggcatgagacatatactcttttaaaaagctaaatttagatttttaaaaagtgacagtaactcttgggataacgttataatctttgtttgctttagctacgcttctaaggagcctgttgtttctcgggaaagctcaaataactcttggttttatttttgtaggctcagatcaccatgaaagtaatccaaggcctatatagtggggtcaccacagtggaactggacaccctggctgctgagacagccgcgaccttgaccacgaagcaccctgactatgccatcctggcagcaaggatagccgtctctaacttgcacaaagaaacaaagaaagtgttcagtggtacgtctggtataaaaacatgagaaagcgtttaatagtgtcataaaattataggaataacaagtgaattttaaagattatgtcttatttttaaaagcaatatacaatttagtggcagcatgggaactagaacttgctgtttctccatgtagctgagctactgagtgaaagagcatatgcgtgtatgtgagtgtgtgttgtgttgaggcagggtcttatgtaacctgggctggctgcagactcagtttgtatccaaagctggccttgaaccctttttttttttaaagatttatttatttatcgtatataactacactgtagctgtcttcagacaccccagaagaaggcatcagatctcattaggggtggttgtaagccaccatgtggttgctggaatttgaactcaggacctttggaagaacagtcagtgctcttaactgctgagcctctccagccctggccttgaactcttaattctcttgactctatccaagttcttagattgctggcagatgtcatcgtattgtcttttgagtttctgttctttttaaacttttttattaattttaagttatgtgtgtttgttttgtgtgtttgtatgtgtatggacaaatgtgtaccacagcatgtgtgtgaaggtcaaaggacaacttgtgggaggcggtccctgggattgaactcaggtcatcgggtttggcggcaaatactttttctgttaagccatgttgctgatctaaggtctatttttgttttttgttttgtttgtttgtttttgtttgtttaaagaactaaaaaggaaaaaaaagaaagacaaaaaaaactaagtggtgagaagtcactaatagtcacttgggaattgctgataagctataagacctaacattcattttctttgaaagaatatttcctttatatataatgtatttttctattgttaatcaacagaggtatgtttgttgagtatttgctctgctaggtgctgaagtgggttggtactaagcaaggattgagagcccattgttttaaaacagccgttccgtggttttgactttattactcttctcttccctcagatgtgatggaggatctctacaactacataaatccgcacaacggcagacactctcccatggtggccagctcaacactcgacattgttatggccaataaggatgtatgtacagcatttctttgctggtggaaaattttcaattttaaaattttttaaaaataatacatttaaggctgggcaatggtggcgaatgcctttaattccagcactcaggaggcagaggcaggtgggtggtgcccacagaggccagaagacagtattgggttcagatttcccgggactattaaagttgtgtgtggttctgagctaccatgtgggtacagggaattgaaccctggtcctctgaaagagcagccatgctcttcccacccaccccccccaccccccaaaacagggtttctctgtatagccctggctgtcctggaattcactttgtagaccaggctggcctcgaactcagaaatccgcctgcctctgcctcccaagtgctgggattaaaggcgtgcgccacctccgtccggctgagcaggcgtgctcttaaccactgaaccatcccaccagtcctctttacaagacctaaatttttagtccttgtggacctgggacctctggcagtcctctgtgcttctgccttgtgagtgctgggattgcaggtgtgggcaccacacctcaccctggtcataatcttgaagacatgttaaaaacaggtaacagttgcaaaacctgagcctaaaaagtaaacactggaaaatgagcaaatactcatagtctagtacttcagttttttgctcatccttagcctgtacctggacttgactgcataaatgcccttcaaagtttgacagacagaagcttttagataatattacggctgatacgatctcaactaattatttttgttttcttctaaatggctttataacttaccaaggctctttaataatgaccaattctatagtattttctgccacaatagtaattcatgttagctaaggaccatgaatttccaaagcctataagctactttctctttgtttataatacatatgattttgttctgtttaaagtaggcttattgtcagaaatttgcagttgaaaatgttgatacatgcttatgatcctagcagtcaggactgtctgtgcaagttcaagaccagcctactggtctccttagtccaggctagtcagggatacatagcaaatttctgtctcaaaaataaataactgtacatatgtaccataaattagtgtgtggtaccaatattttaatattaactagtatgaaagcatgttgggtatcctatattagttttagttctggacggagtcagctgaaaacattagaagttgagaaagtaagttttattattttaattatgaattctttttcttcagcgcctgaattctgccattatctatgaccgagatttctcttataactactttggctttaaggtaaataaataaagaatgggtttcaaatatatgggcatttctttttaaatcaggaagtacagtggtttgtttatgctgatgatttagtttgaatgcacctggctatggtagggttatggtagtggtgatactttaagcaaaattaacgtattcattaatcgcttttgaacttttcaaatattacttgtggattattattaaaattacatgggtaatgtgtcactgtcactccgaattctactgttttctcaataaccgttgattccctactctgctaagtgtttatctaaatatagtgtgttgcttacataatgcagtgactaaggacagggatgtttataggagactgactatgtccgctctcccatttcttattcataagctatgtaatattaaagttttagtcttaggatgggaataacgttcaacatactcttctggaaattaattatgtctcagttagtgtctagtctcttacaagcactcagagatgtggggacatcttgctgctgctgctgctgctgctgccgctgctgccgcataccacagcccatagtgttgtacattgttgcatgcaagcagggcaggccttttccagaaattggcatgtaatctttgctgaagtagaacagccacatgataatgttctagactgaagatagaaacagtaaatgttattcttttcatttaaaatgataacattgagagatttcaactataaattacatatccactgtgtatttaaaaacttgagaattcattggctgctttgctcctctagacactggaacggtcatatttgttgaagatcaatggtaaaggtaagaaatgaaaatgtttttattcattatattaaatgtagagcttggcactattagccttaacattcctatttagactctgaataacattttaaaacatttattgcacttgtggctggagagatggcccaggtggctcttgcagaggacccaggttcaattctcagcatccatgtggcaccctgtgactgtctttaacagcagttctaggggatccaatgccctctttttgttgttggttttttgtttgtttttttgagagggtttttctgtgtagctctggctgtcctggaactcactctgtagaccaggctggcctcaaactcggaaattcacctgcctctgcctcccaagtgctgggattaaaggcgtgcaccaccacacctggcccaatgccctcttcttgtgtctgtgggcatcagacatgcatatctaagcaaaacaccatacacattatagaacgttattacatttatttatttgtgtgcatgggtatgaggagggagggagggagggagggagtgtgccataatgtacatgtggaagttggaaaccagggattgagctcaggttgctagccttagcaacaagtgcttgtgcccactgagccattttgcaatcatccaaataaccttttgttatttggttataaacaaacatggtaagaagagtgcaaatatctctaaattacaattgaaataactgttatgcttgtttgtaaagtttttacaagtttctcttgctgttaattctttggttcagatgtgtttcagactaattattctgatgtgtcctattatctggaaattccttctttgttttcagtggctgaaagaccacagcatatgttgatgagggtttctgtggggattcacaaagaagatattgatgctgcaattgaaacctacaacctactttctgagaagtggttcactcatgcctctcctactctcttcaatgctgggaccaaccgcccacagctgtctaggcacgtatcagttatagctgctttttgttgctgttgctttcttttttattatttatttgtttgtttgtttgtttatttatttatttttggtttttcaagacagggtttctctgtgtagccctggctgtcctggaactcactttgtagaccaggctggccttgaactcagaaatccgcctgcctctgcctgcctcctgagtgctgggatcaaaggcgtgcgtcaccatgcccggctgctttcttttttaaaaaattatttatgtatattagtgttttgtctgcatgtatatatgtgcatgcctattgcccatggtcagaaaagggcattggatccctggaactggagttagatagttctgacctaactatgtgggtgctaggaattgaacccatgtcttctgaaagactagctagtgcttttaaccaccgagtcaactctacagcccctaaagctgcttttataaaaggtttgactagggaaataagaaaaagccaggtggttcatcacattaaaaacaaacaaaaacttcaattattgcctgctctgattaaataatttgtattttgggacaatctctgacttatgggaaataagttggaagtaaatgcagttaaatgagaacgttatacagttggtcgtggtatttgtacagctgactgctttagatgctgctgaacagaatgtttttgatagggaattgcatattggttatattccaagaagattgtttaaaaaaaaaaagaaggctatagctcagaggtagattatgtgcttagcatgcacaaggcctttgggtcaagacttttcagcactgtgaaagtgattagtacttggagctagttacaaaatgcctgcagtaatttattaatttattttaaaaatcataaaaggattaaggtgaaagtagagaggcagattcctaagacacatgggaatcaaactgatagagtttgtgatgttctaaatctgcattaagtttggttcctgagattatgggcagagtaacaggacggcttagctgtgcttagctgagaaagggatccccgttttacatctggagtaagggaaaagaacgcccttagcaagtctgtgtgttccaggaagtcagggatatgccagtgtctgtatacatatctcattgtactaacacttatataactcattgctgttttataataaaattcactagcaaaactggtatatgaaataacctccttaatttggtaaaagataaccactaaaaacttagtctgggcttaaagagatgactcaggttaagagtgctcgtggcttttgtagagcacctacttttggtctccagcaccaatatggtggctcacaaccatccataactcagttccaagggatctgacgcctctgaccaggcatgcatgtggtacacatagatacatacaagcaaaacactcataaaataaaataaaactaaaaaaccaaaaaaatcaaaaaaaaaaaccctcaatcattagatctgttactgcttttagtgtggcagtggaggtctgagcgggtgttgtaagataagatgttgaaatgattgaagtgtttgaaaaatggaagaataaagatcacagataatatttttacataaagaattcagaattatctatggacaaattagaattaaggagattttagctaagtacttggatataagttcaatagaaataaatttatgtgttcctgtattgtagcatttagaaaatttaattttctgctgttcagagccagccatgatggttatgcttgtgatctctcagggggtaaggacagaagaattaccattttgggaccagtctgctctctgtagcatattgacagccagcctgagctgtataggaagaccctgattctaaacagcaagatttgggcctctagctttgtggtagactcaaggggccttgagtttgattcctagcacccaactactcaagaatcttgcgaacattggaaatggtagtgctgaggtagaaggatggagaattcaatgccggcttgggctaatatgccctcataaacaaataaatagaggggaggaagaattttagcagtttttaaaaaagcaagtaagttgaaaataatttaatgaccatgaacaagcgcacggacatatgggataattatgcaatggaatgctttacaaccatgaaaataagttaagactacatattattaggtatggattgctataatatttttgaattaaagacaggcttcagaagggtaactaattaagaaattacaattagggtctttgtggcatcttatttcttgagattggtgttatatagacatgtgtatataatcttaatgcctgagtattttatagaaagtcagtgaatagaatctatttgagtcctttaacattcaagatgacaaagagaccctggtagactaatgctagggaatgtgagtgtgaagagatagatccaaagtttaagtaggtgggacatcctttttaaaaagactgcaggttggactgtggtggcacgggcctttaatcccagtactggaaggcagggagatctctgtgttcaaggctagcctagtctacagattgagttccaagacagccagggctacacagagaaaccctgtctcaagccccagtaccctcgaaacccaaacaaataaacaataataacaacaaaaaagaccaagggaatggtatttttaatgtacatgtcaaagaatttgctgactatatggtatttgttttcaaaaaaacttcatttttttaaggctgggcctggttctggagataggtgtgatctctgagtttgagaccaccctggtacgtagtgagtttcaggatggtgctatgttcaggaccttgtctcaaaaacaaaaacaaaaaaccaaggaacttcatttttctaaatgaatcctggcacataagtggtctggtaaaaaccaggcttgatagtttaggcttacctatcagacttccttctgggtttaatgtctaaggtagttaacagttaatttaatttaaaataatatattgatgttttatattcagtaaaaggtgtttctcctcatatatataaaataaataaatctttaaaaggggggggaggggctagagagatggctcagaggttgagagcattgactgctcttccagaggtcctgagttcagttcccagcaaccacatggtggcttacaaccatctgtaatggatctgatgccctcttctggtgtgtctgaagatagctacattgtgctcatatatatataataaataaatctgttttaaaaaaaaaggtgttttcccatcttctgcaaacacttaggagctttgtagactttaaatctcttgttgcctgatgtagacgtctagataatctaatcactctatgtcactcactgacttccttgctttggttgtcttttttttttctcactgtagctgtttcctcttgagtatgaaagatgacagcattgaaggaatttatgatactctgaagcagtgtgccttgatttctaagtccgctgggggaattggtgttgctgtgagttgtattcgggccactggtagctacatcgctggggtaagtgttaagttgtaagacttttgatatcactcctatgtgtgctccagaggccatactgtcgtaatgctggtgcttgggaggcttgggcttctgctaattaacacctgttggtgtgagtaggagggaggtattttgcttcttgcttcctgtgttgtattggagggtgaggctgtgtgagatgatctatgtagtatttttttgctcagattttaaaattatgattttattttttttggtttttcaagacagggtttctctgtgtagccctggctgtcctagaactcaatctgtagaccaggctggccttgaactcagaaatctgcttgcctcttcctcccaagtgctaggattaaaggcgtgaaccaccactgcccagcagaattatgattttttaaaaagcaataataatagctatctttttgttgttgtgttgaggcagggcttcattttgtagactgggctggcctggaactcagggggatctgagcctgtgtctctcatgtgctgggattaaagacatgttaccactgtgcccagccagctatcacttattgattgctcactatgtgccaagtctgttccatattttataggaattactcattttacttactgtagcctaggatacagccatcaatccagtcgcttgctagcaactttgttccttacaataatccaggcaccagtgttttcatttttcacatgaagaaagtgaggcttcagagttagtttttttctgtgtctgtcacttgctgtatggtagagctgggattccagctctagacactggaaagcaaggtgatgaaaagtgcagggcttggatttccatactgtatttttccctactggcagtgtggcctggagggagttacgtcagcatttttgtgtgtaatgtgaaaaaacataaaccctaatagaatcaggttctcaaggaaattgtcctatgatatattggggcgtgtaggtgtgcaatgtgtcttttttgtttgtaatatctgtaatattttgtgtatttatatctatctgtccattttgtttgtttttcaagacagtatttctgtttactatctgtctgtctgtctgtctgtctatcaatcatctgaatttgtagagtgagccacagcccacttatcttttcaaactctttcaaagatttaccttggggtttagaaaattctttaaagaattgaaaggtattttttagtcataacactatttgcttagccttattctataatccattcattgctgagtctccattttgttatcttggtatgttgacagcatagcatatcattttcattatgttgccttgaattctttggggggaggtgctatcatagtatgttttgttttcttttatggtacccaaagtatatcttggtttgtttgatttttttttttttgagacatttttctgtgtagccctggctgttctggaactcactctgtaggccaggctggcctggaactcagaaatctgcctgcctctgcctcctgagtgctgcgattaaaggtgtgcaccaccacgcctggccggatttttttttggatgtattatatctcataaagtagataaagtagggttgttgaggtagctcaacatataacttacataacaatattttgttgtttcttatgttgggtattatattttcattgctgaggtggggagtagctcaaacttcatagatgggttcctaggaaattagtcagtgttttgaacagaagattggaaacagtttttatttttatgctattcctggcttttttttattacttgagacctatatcttaatcaggtgcctttatttttgtcctttctttcagactaatggcaattctaatggccttgtgccaatgctgagagtatataacaacacagctcgctatgtggatcaaggtggaaacaaggtatactttgttatggacaagggctggaaatcagaattaagtctttagctatactacttggttcagttatatattgttttactttgtttttaaagattaattaattaatttattaatatgattagtatgtgtatatctatgtgtgagcatgtgcatgtgggtgttcatggaggccagaagaaggcctctggagctggagttataagtgattgtgagacacccaccgttggtactagaaacgtagctaggaactaagttctagagttctggaggccagaagaggatgccagatctggaagtggagttatgggctgtgttgtgagtgtgaatgtggtgctgggagcagaactgtgatcctttctttgttaaagcagcaagtggtcttaactgctgagccatccctccagccccaaattttctctgtcatttatgaaaaatattagtagtttacttttttgatactgttacttatttcacttaatttactcactgatcatagtaaagatgaaaggagacattatgcaagtgttttgcaaactatgaagcttctttgttttgttttgacttggatgagaatgctgacttatttacctttagcgcccaggcgcgtttgctatttacctggagccttggcacttagacatctttgagttccttgacttgaagaagaacacaggcaaggaagaacagcgagcacgcgatctcttctttgcactttggatcccagatctcttcatgaagcgagtggagactaaccaggtgagagggctcctctcagcttggttcttacaagctttgttcttcagtccttcacctctgtgatgccacagacggcaagttctcgagagtcgatgacacttgacctgtgcaagcaggcagaactacagttttagacccccactctgacttggacagcagatttccatggcagtcccttgttgcagtgtgtgggaagggctgtggctgctacgtgacatctctcatgctggcactccttcttggcaggactggtcattgatgtgtcccaatgagtgtcctggtctggacgaggtctggggagaggagtttgagaagttatatgaaaggtatgaggtaactgctaatgttgcaagcatcatcagacctaacacttctctcgctgggcatccaaataccagaagtgtgtacgctaagggcgaggcgcttgagaacgctgctcgcttttcatgttgctaggcaccagtgagtttgatccctaccagtggaaaaacagaaaaatatttaatcactagctcatttctagaaatctttgaaagtatctagaagaagagtgtaattttttttaaagatttatttattttatgtatatgagcacactagctgtacagatggctgtgagccatcatgtggttggtggttgctgggaattgaatcccagctctctctccggctggtcctactcactccagtcaaccccgctctctctggcccaagtgtgtgtaaatagactgtagctgtcttcagacacatcaggagaaggcatcagatctcattatggatggttgtgagccaccatgtggttgctgggatttgaactcaggaccttcgggagagcaatcagtgctcttaaccgttgagccatctctccagcccgagtgtaattgttagtttgatttttgttagatgtttcttgattttttttttttttttggtaccaaaattagtatttatcttcttaaaatttatgtactttgcatttttaattgatccttattaaaactgtgattaaagagtagctaagttattttataatatagtactttttattattattttttaaattacatttaattattttgggcttggggacatgagtgccacagtgcatatatggaggtcaggggacaacttgcaggagttggttctttccttccaccgtatgggtcccagagatcaaactcaggttatcaggtgtggcagctgtccccctggctcccgagtaggactttggtgataggaatcacagtaactaggacacacaagttaaaattagcacagcactgaattatgttttgttttgtttttatttttttgaaggttaatgatagtttcattagcgtttgagaaaaacaagagggcaggcaagctataaatattatcaactgcaaggagggatctaaaagaggaagagagaaagccatgcccctttaggttagggtctgagaaagtaggcagctttagcagtggtgttcagtgtgcagctgcatgtaggaggagaagcgacttcagagaaagaaagccagagcaacagggaaagcaaaacagaacaaaaagcaaaagtagatgcaggctgcgtggcagaggctctgtaagcagctgccagtcttgatggtggtttttgttccttttggttgtgaaaagtagtattgactgggtggggttaagggtcatctgaaggactctaaagctgcctggttttctgtggtcttagcggatagaaaatagatttcagggttggagaaatggttcagtagttaagagtttttgcacagtcttgaggccctgatttagatgtcagataactagatgacaagccaggtgtcctggaaataccagtaactcagctctggcttccgtgtgcccaggcatgtgcccaggcatgtgccctcacaacactcatgcacatatacttaaacagacacacaaataaatagaaccaacctttttttaaaaaaaaaaaaagtcattcatttttttccctcattagcaaagctttgagaatttgcctaattttatatttttctgtattcttcctagggtgtgaatgttgagataatactagctttgtctttcagttacgagaagcagggtcgtgtccgaaaagttgtaaaagctcagcagctttggtatgccatcattgagtcccagacggagaccggtaccccatacatgctctacaaagattcctgtaaccggaagagcaaccagcagaacctgggaaccatcaaatgcagcaacctgtgtacagaaatagtagagtacaccagtaaagatgaggtaggcggagagactgactgcctagcacaccgagggactggagaggtggttgctgcttgtcgctccctcactgaacccagtggttatttgaagtggttgaaggagattttgttccccaggactgaaaagaaattttgtggtggagttatgttaactaagctgcattttaaaaacaataatttaagtacccgggagcaaggagaacggaatgcaccagggagtacagttaagagctgggcagtggtggcacacacctctaatcccagaacagagttaggcagatagatctctgagtttgaggccagcctggtctataaagtgagttccaggacagccagggctgcactgagaaaccctgtctcgaaaaaccaaaagaccaaaaccaaaaccaaaaacctatttcagtattctgaatagtgcaactcatgtgactgatagcaagaggagtagaatccatggggtatagaaatttgctgataaatgatgggaaaccatgattttagggggtggggattttgctgagttataaagaggttcccagtaaagactaatacattccttgagtttggtcctctgcaccagtgttggggtgattgtaagttttcacatctgattgttccaaaggctctagtgatctcactgatacaggaagaagaagtcaggagtgtgtgtgattctgacacctttctctggattgcaggttgcagtttgtaacttggcttctctggctctgaatatgtatgtcacaccggaacatacgtatgactttgagaaactggcagaagtcactaaagtcattgtccgaaatctgaataaaataattgatataaactactaccctattccagaggtatggatagatttctctgctttattgatcattattgaatccagatggaggacatttgtcttagtctggctgtccccagagttggtgtgagagaaggaaaatgaaaaggttgtgtgtaagtgtagaatgtggccttctgagttcagtgatgttttcttttctttttttcctaaaccttttggcacaaaggcacacttatcaaataaacgccatcggcccattggaattggggtacaaggtttagcagatgctttcatcctgatgagatacccctttgagagcccagaagcccagttattaaataagcagatctttgaaaccatttactatggagccctggaagccagctgtgaactagccaaggagtatggcccctatgaaacgtatgagggatctccagtcagcaagggtgtaagtagatggctgattttctgttgcctgtgagtatggggaatgagctgaatggcccctcctccatgggacctgggagggtgtgctgggttgtgagagggtctgtacagatttagttaaggaccttgagatggcattgttttggattattaaggcctagatttattcaagtgcgccctaaatccagcaatccctgttctgcaagagaccgggagttatgatattcccaaaacctgttcgttcacactagtagactaggagatagattaattatccatggtctgggacaccagggactggaatctggggaggcctcttagagttgatttccttgctgcctttgtctcttctttataaagatttagttttgaagtttgttctgatacttaggaattctaatatgtgattatttgaaatttggtattctaggccaaataaacagatgaaggaagcaaagagcagagtgtgctttattataaaaggaatgtatctcttaaaatgtttaatgactgttaagatttcctagtttgtcgatcctcaggagtgtggtgaggtcccaggctgcttctgagcaatatgcttaatggagccatgtctaagactcagtgcagctaacgtcccttaatgtgttgactacaagatgcagtggctggaatgtggggatatggcagttagttattttaaaaaaatttttttggtcattgttttaaattgccccaaagtaacatcataactgtggggtatttatctcttagattcttcagtatgacatgtggaatgttgctcctacagacctgtgggactggaagcctctcaaggagaagattgcaaagtaaggagtgaggtgtaaaggaccctggaggccggaggccgggctcttctggctcttcaggagttggatatgctagtgtgacctctgaaacttataaattatcttctgaaatggggctaaagtgacctaccacagaaatggctttggaaagtataagaaaatagttacatgaaagttgtttggcatagtgaaagcctttcaacacacagtaggcatttcagtgggagttgatgttatttgaggagctgaacaaccatgctagtcaattttttgttttattttggttttgggtttttttttagataagtgtcttactatgtagctccgaatgccctggaactcatgtagatcaggctggcctcaaacttggagatcctcctgcttcagcttcttgagcactgggactaaaggcatgtgccatcactacctgacccaaataggtcttcgttttaaaaatgtttttattctttaattaattgatttaattttattttgtgtgtgtgtatgtatgtatgtatgtatatatacacacacatacatacacgcacacatgtagtttttcatgtaaatgtgattgaatatgacatattctgagactttttggtgtttggtttagagatctttcagtgtagtgtaattacaattactgatgattccgtaattgggattgagcaagtatgacatgaaagtgttttcctatctataaccatgattgagatttacagttgaggaagtagagacgtgagataactgatatcttacatctagagagtgactgagctttgaacctagttgtacaaacccgctcaggacccgaggctcaacttatggtccgtaagcgtgggatgttggaaagatatgctgtctgttagaggaacttaactaatacaagcagggcagtctgtggtagtcactggagaggcttgatgaacagtgtttgttttcacatttgtgttcattcccacctgctcaggaaagtgctatagtgttggtctctacacacatttctactatttatatattgtatgtatgtgtgcgtatatactggtgcacatgtggaggtcagagaacagcttgaaggagttggttgtctcctaccatgctgaacaatatataccttatatattgaccccaggttatcaggcttggtgacagatacctttacccactgagccatcttgtagaccgtggagttggtagctcttagactaagctgtggagagttctaagagtgttcaatattcttgtttaaacactcttggcacttaaaagtgaaaaaaattaattttttttttttttttttggtttttcgagacagggtttctctgtgaagtcctggctgtcctggaactcactttgtagaccaggctggccttgaactcagaaatccgcctgcctcttcctcctgagtgctgggattaaaggtgtgcgctaccacgcccggctaaaaattaactttttaaaaactagtaagtctggattttctctgagtgtaatgtgccctttacacaggataatgaggattgtagtcatacatgactaatcctgaccattttcacagcattgttttacgaaggggctggcagtcatagaggcacacagagaagatgagtggggttgaatggatgtgccttgattcagatgagctgctgaggactgagttcagtttttcctgggcaaaacagtgcattgagtgttctatgtgactcctaagtgccacagagcaagtggcaacagtggggactttaagacttgctcacagttacagttgtgctggttctgttggtgctgtggcatccgtgccgtggactgtatcctgctggagtttaacgaagtcagtatgtgagttaaatgcctctgggatgttctcctagcatctgtctacactaagtgatgcagagtagttgccctctgggtagagtagcacgaatctctaatctctctctctctctttttttaaaggtatggtataaggaacagtttacttattgccccaatgcctactgcttcaactgcccagattctggggaataatgagtccattgagccttataccagtaacatctacactcgaagagtcttgtcaggggaatttcaggtgagaattttacagatttatagaagctcttctgaaaactaatagtaaaaacttactcatactttgcttaaacaactaacattaggaaagtcacccttttgtttgtttaaaacagtctcaggtagacctgtctgaccttcagcttaccctgtagctgaggatagccttgcacagatcattctttctccagtgctcaggtgctgggattacaggtgtgcaccaccatgcctggcctagtcagagtcaacatgtggctaaaattggggcagggtggttaagatagggcttctttgtgtagcagccctggctgtcctggaactcactttgtagaccaggctggccttgcactcacagaaatccacctgcttttgcctcctgaatgctgagactgatggtatgtgctgctaaccacccagctttttggcttttttagaaaagcctcactatgaagatcaggctggcctccaatttgcctactaagtgatcctcctgcctctgccttctctgtacttggtatgtttcaccactggctgcatgacgttttgtatttgctacctcacatgcttcagttgggattgtaaaggtgtccatagaagtgtcacacaggcatggtggtctgtatttatagttccagcacttggaaaactgaagcaggaggcgttctagttttaggctagcctaggctacatagcatcccttctccccctatttctttttttttttttttttttaaagatttattttatttattatatgtaagtacactgtagctgtcttcagacactccagaagagggcgtcagatcttgttacagatggttgtgagccaccatgtggttgctgggatttgaactccggaccttcggaagagcagtcgggtgctcttacccactgagccatctcaccagccccccctatttctttttaaaaaaacaaaacaaaacacaacattaaggagtagttctcaggtgaagagtggtggctatgcccataattcttgaacttgggaagtggaggcgagaggatcagaaggtggagctcagccttggctctgggcagtttacagtagcttgagctataaaatggttaccaatgagaatttatgtgctgcaagtcagaaattactaattaaaacaaacaaacaaacaaacaaacatgtggatttccaggtgtcctgaaataagttttgtgaggtatagggaagttgcatttctagtgattttactcaagtactattgttcagtcactttagaaaaccaaagaagaatcagtctctataaacttactcagcttagacactgccgtttcttttctttgcaaatgtcatattctttctttagctttttaaaactttttttgggtgtggggtgaggacagcatgttcatgccatggacagaggacaactcctgggagttctgtccttctaccatgtgagttccagggaggaaacacataaccttgaatggctgaactaaaggtttattttattgtgtgtgtcagcgggagtgtgcatgtgtgtgtgcaggtgccttgcagtaagaacaggtgctattcctgcagaagacccaagtttggttctcatctcccacactgaaggctcaggggagttgatttgtctggatatgcacatacatacagtcaaaaccttaaaagatagataatctgatggatatgtatgtgatgcatagatatgtacattgtagagtgattatcactatacactgtttctttcataatagatgtcaagaccttaagggtcttgtagctttgtgtggtgaaatgtcctcctcagttgtgtaaaaatagtggggtttattaggggatctaataagttattcatctgtcttacttattttaggcttcaggcctgggacccttttgtaggttgtactgatgttattttatttcttgacatgttttctgcttttttcatcagattgtgaatcctcacttactgaaagatcttactgagcggggcttgtggaatgaagagatgaaaaatcagattattgcatgcaatggctccattcaggtacagactggaaataacatgtgcttctaggagctgagctgagcattgtggtgccatgtcccttctcccagccaggcagtgcgtaggaaaatggcctttcactgtggccgtgcaggttctattaatgtctctctgcattgttgtgctagaattgcacacatctttatatggtctgtattgtttctccgatagagcacagttcccagtttttctgtacaacctgggaacttttaaaaccttgaagcttgggttgaatttattgctaagtaagtcaggaattcttaaagcttgaaattggagttcaactaaaaaagtgtggggactgagacccacagtgtagaaggtagttaggtagcacttaacaataaagtgactgcatttgacccacaggcatttgggtctcaagatagacaccttagccgggcagtggtggtgcacacctttaatcccagcacttgggaggcagaggcaggcggatttctgagttctggtctacaaagtgagttccaggacagccagggctacacagagaaaccctgtcttggaaaaagaaaaaaaaaagatgctttggccagcttggcaacttagcctctttcagattctcatggcagaaagtgtagcatcagtcaggttgtgtgtttcaatacagttggccatagaacaatttaaaggagtttatctcagtacttcgtttgatcaggtccctgtaaagtcctgattatttgtttttctttcatttagcttcgctcttattttcctttcctttcctaactacctctagaacagtaactgttttgtccataagccagttcaagatggatgtctaagtcactgcatcacatttatatttggttggtaaaatgagattttattgatgttctaagcaagagataagtagtttgggctaacttgctataagcattcagatactaactcatagcggtatcaggtctgcaggaagatccaacccagcatccttgcaaggataattagtctgctagttatattgctttctttaactggaattaaagcaacaacaacagcacatagttttcctttttcagagcataccagaaattcctgatgacctgaagcaactctataagaccgtgtgggaaatctctcagaagactgttctcaagatggcagccgagagaggtgctttcatcgatcagagccagtctttaaacatccatattgctgagcccaactacggcaaactcactagtatgcacttctacggttggaagcaggttggttgagcactctgaggaggacttaattgccagctcgaaatatttcagagtggaatagttgctgctagctgcctgctataaagttttttcacttcaagtgttaaaactcatgagtggtttttatgccagctcagactttgtctgggttttcttgtttcagttcagcagttgtacactgcctggtgtgggtgctggggattgagcactcaggtcctctagaaggctaggacggttcttaattactgagccatcatccagtcttggtttagaatttttactctctcagatttcatacagtgtgttttgatcacaatcacccttaatgactcccagaccccttacctctcaactcctacatctgtctgtctgtctgtcagtttttactgtccatatacttctggttatgggaccatcccctggaaggaactttctcttcctaagaaacccttcttaccccctcagggtgtggctcatgaactccatgctagaacagtgactcgcttgcagccagagacaccttcactctaaatgtcagggtctctggctctcacagtcttcctgcccctatgtactgtttcataagtctttcttcctcttcaactgacctctcgggtccaaacccctttgccatttccaaagtagcttcacactgtcagtccactattcaaaacgtccattgttcccaactttatcccagtgtatgagccacgttacactgttgccaactgcaaagtgctgtgattctgttttcccttacattcttatgtcctgacgagtgtgaggccttctgtggaattacagagtgactttcttacttgcatgcttttgtctgtctgtcctgggaatcgtggccaagaagattaccctcgtgaaggatttagtgcgctgcagaagcagcctcatcccctaaatggttacaggctaaggcaggcgtgtgctctgtacagacctgcaagcagtacacgtaaaagtaaatacaaagaaacaaaaagatttgctattccaaagaggcaacattcctatttcagggatgaaaaactcaagcatttttcagggtgctttgtagaggagataaaattacaagtttttttaaaaagattggttcataggaatacatttaaagattttaataactagttttgtaactgatcacttgggaattttaaacaaagactgtctagtgttctggagttcttcctaatagctacgttttcttcccttgcagggtttaaagactggaatgtattacttaaggacgaggcctgccgctaatccaatccagttcactctgaacaaggaaaaactgaaagataaggaaaaggcactgaaggaggaggaggagaaggagaggaacacagcagccatggtgtgctctttggagaacagagaggagtgcctgatgtgtggatcctgagaaaatcagggcctgggagacgcagcgggctctcctgcccgccgaggcagacgatttgagcatagataggatagtgggtttgcttggttatcagcagctctgcttggacgtgcctgccaggacagggagccacgacttacagtactgtttctacacagtgtaaatatcatttttaacaaacagaaaaccaaagccagctttgatattaggaatcaaagtagaggctttgggaatactaaagagccttcctgcaaattagtgaggagacttaggaagtctcgtctctccagctttccctgcctggccattctcagtttgggcaaagagatttagtttgatttgactgattgcctagaagtaaaatcaagcaattactcatcagctaaagacctttgtctagacaaacttctataggtcattttgaaataaacatttctaagtgattgtgtggtactaaacttgtcatctattatcatacaagacagtttaggggaaaaaacccaaaaacccaacattttctgttgagttcagagagacaaactttaaagacatttagattgtatagatatctagtgttaacatatgccctttcctgccccaggatgaaatcttgttaacataaaattgacagtttctttcatttataatttgattctgtggcatttagttcattcacactgttgtataaactgtcatccacaccatttccaaaacattccatcattccaaatagagactctactcataaccacacttcttacacctttttgaatatgtattcctcatacacataatgcagtatttgcacttgtatggcttgcatgatatctagatacatcacagtgtgatacgctgtccctccatatgtgcacaccatcttgtatccatcctgtcatctgttcatgaaacttggttgtttcctccctttagatagggagaataatggctgccatgaacattggtctacaaatatctattggattcctgcttttaggtttggtggttctatacagcaaagaattgctggactatataattctgtttgactttgaggagctatatttgcagcaccattatatttctataaaagtactaaaaggccttattctgtcttcataccttataacactcgattttcatatttttgataaagcccttctatgagtggggaatttcctggtcttgtagattgacttgtttcgttaaacccgagttttggggcattttctccctttagtcatcacatcctttttttcccttatgaaactcataataaatctgctttacg

SEQ ID NO: 5 - protein, 792 aa, Mus musculus
MHVIKRDGRQERVMFDKITSRIQKLCYGLNMDFVDPAQITMKVIQGLYSGVTTVELDTLAAETAATLTTKHPDYAILAARIAVSNLHKETKKVFSDVMEDLYNYINPHNGRHSPMVASSTLDIVMANKDRLNSAIIYDRDFSYNYFGFKTLERSYLLKINGKVAERPQHMLMRVSVGIHKEDIDAAIETYNLLSEKWFTHASPTLFNAGTNRPQLSSCFLLSMKDDSIEGIYDTLKQCALISKSAGGIGVAVSCIRATGSYIAGTNGNSNGLVPMLRVYNNTARYVDQGGNKRPGAFAIYLEPWHLDIFEFLDLKKNTGKEEQRARDLFFALWIPDLFMKRVETNQDWSLMCPNECPGLDEVWGEEFEKLYESYEKQGRVRKVVKAQQLWYAIIESQTETGTPYMLYKDSCNRKSNQQNLGTIKCSNLCTEIVEYTSKDEVAVCNLASLALNMYVTPEHTYDFEKLAEVTKVIVRNLNKIIDINYYPIPEAHLSNKRHRPIGIGVQGLADAFILMRYPFESPEAQLLNKQIFETIYYGALEASCELAKEYGPYETYEGSPVSKGILQYDMWNVAPTDLWDWKPLKEKIAKYGIRNSLLIAPMPTASTAQILGNNESIEPYTSNIYTRRVLSGEFQIVNPHLLKDLTERGLWNEEMKNQIIACNGSIQSIPEIPDDLKQLYKTVWEISQKTVLKMAAERGAFIDQSQSLNIHIAEPNYGKLTSMHFYGWKQGLKTGMYYLRTRPAANPIQFTLNKEKLKDKEKALKEEEEKERNTAAMVCSLENREECLMCGS

SEQ ID NO: 6 - DNA, 3997 bp, Mus musculus
tcaatatggcggccaagggactcgtgtgctgtctgtctactgctcagtttccgcccattcaactcccggcgttgaaacgtcaagaacgtcattcgaattccgtccgtcgcgttgctctgcacgtcacgggtggcgggagcgggaaggagttcgtaattcggttagtctgctctggtgaggaaagtgctgtctatcgcgcagcttccatccctccgtccgagcagcctctcggagtccaacccttcacatctgacagtcgtctctgtcccttcttcgcctcggagctgctaactggtctcgaacctctcagcacttcagcttctagcggcgatgcatgtgatcaagcgagatggccgccaagagcgagttatgtttgacaaaattacatcacgaatccagaaactctgttatggactcaacatggactttgttgatcctgctcagatcaccatgaaagtaatccaaggcctatatagtggggtcaccacagtggaactggacaccctggctgctgagacagccgcgaccttgaccacgaagcaccctgactatgccatcctggcagcaaggatagccgtctctaacttgcacaaagaaacaaagaaagtgttcagtgatgtgatggaggatctctacaactacataaatccgcacaacggcagacactctcccatggtggccagctcaacactcgacattgttatggccaataaggatcgcctgaattctgccattatctatgaccgagatttctcttataactactttggctttaagacactggaacggtcatatttgttgaagatcaatggtaaagtggctgaaagaccacagcatatgttgatgagggtttctgtggggattcacaaagaagatattgatgctgcaattgaaacctacaacctactttctgagaagtggttcactcatgcctctcctactctcttcaatgctgggaccaaccgcccacagctgtctagctgtttcctcttgagtatgaaagatgacagcattgaaggaatttatgatactctgaagcagtgtgccttgatttctaagtccgctgggggaattggtgttgctgtgagttgtattcgggccactggtagctacatcgctgggactaatggcaattctaatggccttgtgccaatgctgagagtatataacaacacagctcgctatgtggatcaaggtggaaacaagcgcccaggcgcgtttgctatttacctggagccttggcacttagacatctttgagttccttgacttgaagaagaacacaggcaaggaagaacagcgagcacgcgatctcttctttgcactttggatcccagatctcttcatgaagcgagtggagactaaccaggactggtcattgatgtgtcccaatgagtgtcctggtctggacgaggtctggggagaggagtttgagaagttatatgaaagttacgagaagcagggtcgtgtccgaaaagttgtaaaagctcagcagctttggtatgccatcattgagtcccagacggagaccggtaccccatacatgctctacaaagattcctgtaaccggaagagcaaccagcagaacctgggaaccatcaaatgcagcaacctgtgtacagaaatagtagagtacaccagtaaagatgaggttgcagtttgtaacttggcttctctggctctgaatatgtatgtcacaccggaacatacgtatgactttgagaaactggcagaagtcactaaagtcattgtccgaaatctgaataaaataattgatataaactactaccctattccagaggcacacttatcaaataaacgccatcggcccattggaattggggtacaaggtttagcagatgctttcatcctgatgagatacccctttgagagcccagaagcccagttattaaataagcagatctttgaaaccatttactatggagccctggaagccagctgtgaactagccaaggagtatggcccctatgaaacgtatgagggatctccagtcagcaagggtattcttcagtatgacatgtggaatgttgctcctacagacctgtgggactggaagcctctcaaggagaagattgcaaagtatggtataaggaacagtttacttattgccccaatgcctactgcttcaactgcccagattctggggaataatgagtccattgagccttataccagtaacatctacactcgaagagtcttgtcaggggaatttcagattgtgaatcctcacttactgaaagatcttactgagcggggcttgtggaatgaagagatgaaaaatcagattattgcatgcaatggctccattcagagcataccagaaattcctgatgacctgaagcaactctataagaccgtgtgggaaatctctcagaagactgttctcaagatggcagccgagagaggtgctttcatcgatcagagccagtctttaaacatccatattgctgagcccaactacggcaaactcactagtatgcacttctacggttggaagcagggtttaaagactggaatgtattacttaaggacgaggcctgccgctaatccaatccagttcactctgaacaaggaaaaactgaaagataaggaaaaggcactgaaggaggaggaggagaaggagaggaacacagcagccatggtgtgctctttggagaacagagaggagtgcctgatgtgtggatcctgagaaaatcagggcctgggagacgcagcgggctctcctgcccgccgaggcagacgatttgagcatagataggatagtgggtttgcttggttatcagcagctctgcttggacgtgcctgccaggacagggagccacgacttacagtactgtttctacacagtgtaaatatcatttttaacaaacagaaaaccaaagccagctttgatattaggaatcaaagtagaggctttgggaatactaaagagccttcctgcaaattagtgaggagacttaggaagtctcgtctctccagctttccctgcctggccattctcagtttgggcaaagagatttagtttgatttgactgattgcctagaagtaaaatcaagcaattactcatcagctaaagacctttgtctagacaaacttctataggtcattttgaaataaacatttctaagtgattgtgtggtactaaacttgtcatctattatcatacaagacagtttaggggaaaaaacccaaaaacccaacattttctgttgagttcagagagacaaactttaaagacatttagattgtatagatatctagtgttaacatatgccctttcctgccccaggatgaaatcttgttaacataaaattgacagtttctttcatttataatttgattctgtggcatttagttcattcacactgttgtataaactgtcatccacaccatttccaaaacattccatcattccaaatagagactctactcataaccacacttcttacacctttttgaatatgtattcctcatacacataatgcagtatttgcacttgtatggcttgcatgatatctagatacatcacagtgtgatacgctgtccctccatatgtgcacaccatcttgtatccatcctgtcatctgttcatgaaacttggttgtttcctccctttagatagggagaataatggctgccatgaacattggtctacaaatatctattggattcctgcttttaggtttggtggttctatacagcaaagaattgctggactatataattctgtttgactttgaggagctatatttgcagcaccattatatttctataaaagtactaaaaggccttattctgtcttcataccttataacactcgattttcatatttttgataaagcccttctatgagtggggaatttcctggtcttgtagattgacttgtttcgttaaacccgagttttggggcattttctccctttagtcatcacatcctttttttcccttatgaaactcataataaatctgctttacg

SEQ ID NO: 7 - DNA, 24302 bp, Rattus norvegicus
cgggtggcgggagcgggaaggagttcgtaatttggttcgtcccttctggaggagaaagtgctgtctgtccggcagtttcaacctctcggtctgagcggcccctaaggagtccaacccttcacatctgacagtcgtctctatcctatcttcgcctcggagctgctaactggtctcgaacccctcagcacttcagcttctagcggcgatgcatgtgatcaagcgaggtgaggggtccgtggggatgaggagggggagaggagaccccggcggctgctcagtgcccagcggttactctcgccagcccgcccgacccgcgacgcctcattgcttcccgcccttcccgccgcggcttcccgccctgtctgtcagctgggcctctgctcagtttgtctccattctcttgacctttgtgtgttccctttgactttgacattgtgcttccctctagacttacccctaccttgtctgagattgtttccgagcactgttattccttgcctccatcttcagaggtagctacttttggctccattttacagaagaggttgcaaagacagaaaaagcacccctacaccccaccccaccccggcttgtagttggtgaggttagaattgaaacccataataaccccgcgtctgtctttcttcatttcttaaacaaaccaaccaacaaacaaaacacctcggagtcgatgatctggcctaagaggaaataagaaaagaagactgtggacaccacattttttgaacacctgtcatttttctggtctcttccgaggtgggagtgtggtatttctcctgcctctgtattttttgggagggattttttggttgtttgttttttgggacagagtttctctgactggcctggaagttactctgcgtagatcaggcaggtttcaaactcacagagatgtgcctcctccatcataggtgacttttaatccaatagaccaagactttttatccaaatagacaagattaactactttgcagcctctgcagaccccaaagacaatctcttaataagcatttcattttggaaaattttaaaagcttgagtttttgatattgccatcgtcataactgctaatgttaactgtgacttgattcttcagatggccgccaagagcgagttatgtttgacaaaattacatcccgaatccagaaactctgttatggactcaatatggactttgtggatcctgtaagtaaatacagtgttctttgcttcatgggattttatgtctcttatctctagcccttcacttaactatacttcaatgttaaatgtcaatttattgtctgaaacttttcttaattttgatctgtccttcaagttctcactttttggagaactcaagacatgacaaaggggacagttgatgtgattactgttcaggcatcttatttatccgtatttagccacacagtatagagatttgttctatataccatcatctggaattaagaatgttgtgtaacttattcatttaacctttaagattctctaacaattttatacatacacatataaaatatacttttgtcgtattttcttcagtgtcctctccgtcttacagccccctcttctccatcagtctcttagtgcttcgtgtgtgtgtatgagtgtgtgtgtgtttgtgagtgtgtctgtccccatctctcccacttcatttactcagaggtgttataagggtatttggtctggagttaatttactcgattgagcaacttaccagtgattgcctcactgaggaataagattcctccagcaccattaactgcctgcagatatctcctcagggaggggtagagccccatgaacccctcctctactcatgatggaatgctgatgggcccagtctggtagaaatcgtgtgcagataaccactgcaactgtttttcatgagtttttttttaggatttcgtttatgtctctgtgagtgactgctctaagtgtgcaggtccctgaagggaacagaagagggtatttgatcttgtggagccagttccaagcagttgggagtcacctatgatgtgtgtgttggaaacccacggcaggtcctttggaagagcagtatacactcttttaactgctgagctatctctaacccgcatgagtctatctcattcctgtgatagcctcagtgtgacatttacctaattaggtacttagtaaatgtttagttacccagagtgcgaaaataattttatatcttaaaatatatttattataaatctacacattttggactttgagatagtaattaaaatagttggatgttagtaatgggatgaataagatctcatcctagttcatctttattctgtagctaagacaggtttaaagaggagaggactggtaaagttaatgttagtgcaatgagaaacaatagagcgtcttgatttttagctattctgttgcctcatctaacagcacatgtccacatgcaggtgtgcactcagctttccagggcggatcctcttgtgaaagtctggatgctattagatgtagcacatggatgttacgcgctgatctggttacttgctccatagcatcagaagctatatgggcttgactgctttcatactaatctgctgagtcaagagcatgatatcagcagcagactggcttagctgtgttgtaaatactgacgggtgatcagaggaaacacccacactagactgcttttgaaggagggtaggctttgataaaaaagatttagtaaataaatagatagaacttagaatttatttttctttagaatgtatggtaggctgaggagatggctcaatggggaaactctgagtttggatcccaacacccatgtggcaaagccagatgcagcaaaatacgtgtgaccgcaactctgggcaactcaagaaaggggcagatcctaggtgtacatcaagacgcaagttccaagctcagggagacatactgtcccagaataagagagttgtcgcagcgagacctttttccatgctgattcctttgaccgtgtgtgttatgtgcttggggattgttgttgttgttgttgtcatgttcactgtgcggtttttctttattctttaacattcacccttgctgttaaagaaaataattgtgatcagcttcaacgaagccataacttacaacagagtatcctcattttaggccagccaagggtacgtagtaagagcgtgtcttaaaacaaaaccaaaaatcaacaaataccaaagctattcatatactctctgcttttggtactattgacctttccattttcagtgtctttttactgacataaaaataaggagagcagctgaatcctgaaatcagctctggcctccacatgcgtgcatggttgagtgtgcctacaccaacgtgtgtgtgcccacatgtttatacacacacagtgcatggtaatgggattcgaagatggcccagttggtagtgcttgccttgtaagcatggatccccaggtcttatggggaaagtcaggtgtgagagcgcgtgcttgtgggaaggcagatacagggggctcactgaagttcactgattacttgtattgctcaatcagtgtactccagaatcagtgagagactgtgtctcaaaaactaacctgggatcagggctggagagatggctcagcagttaagagcactggctgatcttccagaagttctgcgttcaattcccagcaaccacacagcgtctgtaactccaatttcagaaggatctgatatttctgccattctctgacacaaggcatatacttgtttaaaaaagctaaattcagacttttaaaaaagggacactcattttatacgtataggatacatttttggtagctttgttggtttatagattgttacattggggtaatgtttttcagatgagattatattgttataactttgtttgccttacctacgcctctaaggaggctgttgtttcttggggaacctcagataactatcggtcttgtttttgtaggctcagatcaccatgaaagtaatccaaggcctatacagtggggtcaccacagtggaactggacaccctggctgctgagacagctgccaccttgactacgaagcaccctgactatgccatcctggcagcaaggatcgctgtctctaacttgcacaaggaaacaaagaaagtgttcagtggtatgtctggagtgaaaacattagaaagacttcaatagtgtcataagattataggaataacaaatatggaaatttcaaagattacatcttattttaaaaagcagtatacaatttagtggcagcatggggactagaatttctgtttctccatgtagctgacctgctgtgtgaggtgtgtgtgtgtgtgtgtgtgtgtgttgagacagggtctcatgcaacctaggctggctgcagactcagtttgtatcaaaagctagcctgaactcttgattctcttgactctatccaagttctaggattgtgggcatatgtcatcatactgtcttttgagtttttaaattttcatattaatttttaagttatgtgcgtttattttgggtgtttgtatttatgtggacagatgtgtaccacagcatgcgtgcgaaggtcaaaggacaactttcgagaggtgttccctgggatagaaccgtcttaggtcatctggtttggtgcaaatactttctctgttgagccatcttgctgacctaagtttctgtttcgaaagaattaaaaagaaaaaagagacagacagacagaaagaaaactaagtggcgagaagtgactaatttctgcattttgtttttccctttttagccttgtttcagagtcacttgggaattgctgataagctagaaggccttacattcattttctttgaaagagtatttcctttatatataatgtattattctattgttactcaacaggtatgtttgttgagtattttctctgctaggtactgaagcgggttggtactaaacaaggattaagagccattgttttaaaacagccattaagtggttttgactttactttttttctttttcttaatctttcctcagacgtgatggaggatctctacaactacataaatccacacaacggcagacattctcccatggtggccagctcaacactcgagattgttatggcccataaggatgtatgtacaacttttttttttctggtggaaatttaaaaaaaaaaattttttttttttttaataatgcatttaagactgggcagtggttgcgaatgcctttaattccaacactcagaaggcagaggcaggtggatttctatctggcctggtttacagaataagttccaggacagtcaaggttattacacagagaaaccctgccacaaaaacaataacaatggtggcaaaatgcatttagaaacatttaatcagtatagaaggcaaagataaaatccagtcctcctgctctaggttctgggttctttgagcagtgtgtctatgtgtgggcaactgttgctgttttcatgtagaactgtgattcgtaagcatcagcctttacgaattttccgcattcatcctatcagtggcgtagcattgcattttagcagaaactcatcttaacactctgtagtagataaattacttggctaactctctaaatatgtatcagctcttatggaaacgtaaaagaaaacagccatttcgatataatttgtaatagtgtttcttcctactcctttttatctttaaggacttttttttttagattttattttatgtgtatgaatgttttgcttgcatgtgtttatgtgcaccatgtgtgtggtttgtgcccacagaggccagaggaggatattgtgttctgattgcctgggactattaacgttatgcatggctctgagctaccatgtgggtgcagggaattgaatcctggtcctctgaaaaagcagccatgctcctaaccactgagccacctcaccagccctcctcacaagatctacatttttagtcttggaagacctgggatctctggcagtcctctgtgcctctgccgtgtgtgctggtattgcaggtgtgagcaccacaccttgccctagtcataatcttgaagacgtgttaaaaacagatgacagtagcaaaatctgagcctaaaaatagtgggaaataagcaaatacttgccgtctagtacttcagttccttgctcattctcagcccatacctggttttgattacaaaactgcccttcagagtttgacagtaagtgggaaagtttcaggtaatgctacgactgatatggtcacacctaattacttttgttcccttctacatggctttctaactcaccaaagctcttaaataatgaccagtcttataatatttttctgccacagtagtaatccattttagctctgttaaaggactgtgaattttcaaagcctataagctactttctgtttgctcataatgcatattctgttcagtttaaagtaggcccattgtcagaaatttgcagctgaaaatgttggtacatgcttatgatcctacggaatcatgaagcagagccaggactgtctgtgagttcaagaccagtctgcagggctccttagtccaggcgagtcaggaatgcatagcaagtgtctgtctcaaaagtaaatagctgtacacacacacaataaaagtataagtgtgtgtggtaccaatattttaatattagctagcatgaaagcatgtttggtatcctatattagttttagttctggtgtcagctaaaaccattagaagttgtgaaaataagtcttactattttaactatggattcttctcaattcccttcagcgcctgaattctgccattatctatgaccgggatttctcttacaactactttggttttaaggtaacttaataaataatgggtttcgaatatgtggggatttctttttactcaggaagtatagtgttttgtttatgctgatgatttagtttgaatgtacctggttatgttagggatatggtaggatactttaaaataagcaaaactaacttattcattaatagcttttgatctttccaaatattagttctggattactttttaaaattacttggggaatgtgtcacaatcactctacattctgccgttttctcaataactgttgatttcctactcagtaactattgattgtctaaatgtattgtgttacttacataaagcagtgactgaagacagcgatgtttagatgagagcaactgacctggctctcccatttcttattgataagctatgtaatcagtttcagtcttacggtggggctaagattcaacatgctcttccggagatgacttatgtctcttgggttagtgtctagtctctttccagcactgcagggatgttaggacatcgtgctgctgctgctgctaccacagcctgtagtgttgtatttgttgcatgccagtgggccttttccagaaataggcatgcaatctttgctgaagtagaacagccgtatgatagtgagctaggccggagatagaaacggttactgttactcttttcatttaaaatgagaagattgagagattccaacagatcaccttgctatgaattacatatccactgtgaatttaaaaacttgagaattctttgattgcttgtcttctagacactggaacggtcatatttgttgaagatcaatggaaaaggtaagaaatgaaatgtatgttgtttttattcatttattaaatgtacagctttgaactattagctttaacatttgtatttagactctgaataacattttaaaacatggcatttggggctggagagatagcttagtggttaagaacctggtcacttttacagaggacccaggttcaattctcagcatccatgtggcacctcataactgtctttaacaacagtttgagaggatcccctcttcttgtgtttgtgggcaccagacatgcacatagtacacagatatagacaaacatatgtctgcatatgtaagcaaaacactatacacattataaaacgttattacatttacttatttgtgtgcgtgggtatggggagggagggagagagggaggggggtatactgcgctataacgtacatgtggaaattggaggccaacttgtaagggttgattctcctccacactgtgggacccagggattgaacccaggttgctagccttagcaacaagtgtctgtgcctgctgagccattttgcagcctttcaaaaaaccttttgttgtttaattgtaaagaagagaaatttttttagcttatggttctggggggggcggttatcacatgataagaacagcacaaaggtctctaaatcacaattgaaataattgttttgcttgtttgtaaagttcgtaaaagtttcttttgctgttaattttttggttcagtgtgtttcagcctaattattctgacatatcctattgtctgaaaattcttactttgtttttagtggctgaaagaccacagcacatgttgatgagggtatctgtggggattcacaaagaagatattgatgctgcaattgaaacatacaatctactttctgagaagtggtttactcacgcctctccgactctcttcaatgctgggaccaaccgcccacagttgtccaggcaagtatcgtctctagctgctttttgttactgtttctttctctgtagaatatttatgtagattagtgttttgtctgcatgtatgtatgtgcaccatgtgtgcctattgcccatgatcagaaaagggcacagatccctggaactggagtgagatagttctgagctaaccgtgtgggtgctaggaattgaacccaggtcttctgaaagacgagctaatgttcttaaccaccgagtcagctctatagcccctaacactccttttatgaaaggtttgactagagaaataagaaaaagccaggttgttcatcacattaaaaacaacaagaacttcaatcattgcctgctctgattaaatagtttgcatttggaacaatctctgacttttatggtaacaagttggaggagggcaaatgcagttaaatgagaattttttttaaatatgtatttattatgtatacaacatacagcttttctgcctgcatgtatgcctgcaggccagaagaggacatcagatctcattacagatggttgtgagccaccatgtggttgctgggatttgaactcaggacctctggaagagcagacagtgctcttaacctctgagccatctctccggccctaaatgagaattttatatgatcaattgtggtgtgatttgtacaactaggtattttagatgctattgaacagaatgtttttttgatgattttttttttttaagatttatttattttatgtatttgagtgcactacagtgagttccaggacagccaggaacagagaaaccctgtcttgaaattcaataccctccaaacccaaacaaataaagaaacaacaaaaatgaccaaggaaactatatatatatatattttaaaagatttatttattctatataagtacactgtagctgtcttcagacacaccagaagagggcatcagatctcattacagatggttgtgagccaccatgtggttgctgggatttgaactcaggacctctggaagagcagtcagtgctcttaaccactgagccatctctccagcccccagaaactatatttttaatgtgcatgtcaaagaattggcagaccatatagtattcattttcaaaaaatacttcattttttaagttcatgactttaatcccatccttctagaggcagatgggggtctctgagtttgaggccagcctggtatgtagtgagtttcaagacagggctatgtagagaaaccttgtctccaaaacaaaaacaaacaaaaaaccaaagaacttcatttttcttggtggtttactaacaattagaaaaatctggtgtatatttaagaatttgtttgagaaaatgaatcctggcacataagtagtctagtaaaaaccaggctgatattttaggcttactataagacttccttctgggtttaatgtctaaggtagctagcaattaatttaatttaaaataatacattgatgttttgtatttagtaaaaggtgttttcccatcttctgtaaacatggaactttgtagactttagatctcttgttgcctcatttaactgtctctttgtcactcattgacttccttgtttttgttgtgcttttttctcactgtagctgtttcctcttgagtatgaaagatgacagcattgaggggatttatgatactctgaagcagtgtgccttgatttctaagtctgctggaggaattggtgttgccgtgagttgtattcgggccactggcagctacattgctggggtaagtgttatgccgtaagacttcgacaccactcacatgtgtgatccagagggcatcctgtcgtaagactagtcctagggacacttggctttacctcttgttggtgtgagtggagggagtcgttttgcttctttcttcctctgtggtattggagggttaggctgtgtgagatgattgctacaatattttttagctcagattttagaattatgattttttttttcaaagcaataatagccatctttttgttgttgtttgagacagggcctgtagaccaggaactcagggagatccacttgcctctgtcacccaagtgctgggattaaagacgcgttaccaccatgtccagccagctctcagtctgttatctattttacagggttgctcattttacttactgtagcctaggaaataaccatcagtccagacacgtgctagccactttgttccttacagtaatctaagttacagtgctttcatttttcacgtgaagaaagtgagacttcaaagttaagtttcattctggatcagtcacttactgtgttagagctgggattcaagctctagattggaaagcaaggtaatggtttgtgcaagacttagatttccatactatatcttttatctactggcaatgtggcccagagggagttatatcagtatttttgtgtgcagtgtgaaaaaacaaaactgtatggagtcaggttcccaagaaattgtcctatgatatattggggtacataggagtgtagtaagtctttttttgtttataatatctgtgatattttgtgtatgtatatatctatctgtccattttgtttgtgtttttttgatttctctgtgcagtcctagctgtcctggaactcactctgtagatgaagctggcctcaaactcagggatctacctatctcatgactcactcactctctctctctctctctctcccccgctctctctctttccctctcatctgaacttttagagtgagccatagctcacttatcttttcagactttcaaagatttaccttgggagttagaaagattctttaaagaatttgaaaggtattttccagccataacactgtttgcttagcctcgtcctataatccattcattgctgagaatctccaaaattttgttatcttgctatgttgacagcatagcacatcatttttattgtgttgccttgaattctctaggggtgggaagtactatcatagtatgtttctgttttcttttatacccaaagtatatctttgtttgatttttttttttgagacattttctgtgtggccctggctgttctggaactcactctgtagacaaggttggcctggaactcagagatccacctgcttctacttctgcctcctggtgccgggattaaagatgtacctcaccatgctcggctcccaaaatatatctttaatctaataatgatcattagattgcagagctcaaatttagctactcgttttttttttttttaatgtattctatctcattataaagtaggattgttgtaaagtagctggacatataacttacttaacaatattttgttgtttcttatgttttcattgctgaggtgggaatggagaagtcaaacttcatagatgggcactcaggagttagttactgttttgaacaagaggttgggaacagtttttactttggggatgttctgtttttttccttgcctgagccctgcgtcttatttgggtgccttattttgtcccttcttccagactaatggcaattctaatggccttgtgccaatgctgagagtctataacaacacagctcgttatgtggatcaaggtggaaacaaggtatactttgttactaacaagggctggaaatcagagttaagtctttagctataaaacttggttcagttatatattgttttactttgtttttaaagatttattttattgttattaatatgattagtatgtagatatctgtatgtgtgagcatgtgcatgtgggtgttcatggaagccagaagaaggcctctggagctggagttataagtggttgttgcggggttggggatttagctcagtggtagagcgcttgcctaggaagcgcaaggccctgggttcagtccccagctccgaaaaaaaagaaccaaaaaaaaaaaaaaaaaaaaaaaaagtggttgttgctagaaacttagctagaatctagtgtctggaggccagaaaaggatatgagatgtggaagtgcagttatgggcagttgtgaacgtgggtgcagggagctgaactgtgatcctttgttaaaccagcaagtggtcttaactgctgagccatctctccagccccaagttttctctgtgtcatttctgttttactcttaaaatttacatttacttatttcacttaattcactgatcatagaaaggtgaaaggacattttaaaaagtgctttgcaatatacgaagcttcttggttttattttgatttggataagaatgctgacttactcacctttagcgcccaggggcatttgctatttacctggagccttggcacctggacatctttgagtttcttgacttgaagaagaacacaggcaaggaagaacagcgcgcgcgggatctcttctttgcactgtggatcccagatctcttcatgaagcgagtggagaccaaccaggtgagagagctcatcgcagctgggctcttacaaactgtgttcttcagtccttcgcctgtgtgatgccacagatggctggatggcacctgacccgtatttaaaagatcacgcaagcaggcagaactacagttttagactcccacactcttatacagcagatttccatggcgaccccttgttgcagtgtgcggtgggctgtggctgctgcgtgacttctctcatgctggcgctccttctttgcaggactggtcactgatgtgtcccaatgagtgtcctggtctggacgaggtctggggagaggagtttgagaagttatatgaaaggtatgaaaaaactgccaatgtcaaaagcatcagagccaacacttgtctcactcagcatccaaataccaggagtgtgtatgctaagggctcgtgtttgagaacacttgcttaccatgttgctaggcatcgagtttgatccctaccattggaaaaacagaaaaatatttaatcactctcacttctagaaatcttcagaagtacctagaagagaatataattattagtttaatttttgttagatgtttcttgatttctttgaactaaaattagtatttatcttaaaatttgggtgctttgattttttaattgattcttataaaaactgagataaagactagctgagttgggctggagagggatggctcagcggttaagagcactgactgctctttcagaggtcctgagttcaaatcccagcaaccacattggtagctcacaaccatctgtaatgagatcagatgccctcttctggtatgtctgacagtgtacttatacataataaataaatctttaaaaaaaaagactagctgagttattttatagtatagtacttttttattactattttaaaaattacatttatttaactatcttgggttggggcaccagtgtgtcacagtgcatacggcgtatatggaagtcaggagacagcttgtaggagttggttctttccttccactgtatgggtcccagggatccaactcaggtcatcaggtggcagcaagtatccttacttactgagccacctccctggtcccagtataatacttttggtaacataaatcacaagtaaaattagcacagtactaaatttttgttttgcttttgtttttgtgttttttgaagcttaaggacagtttcgctagagtttgagaaaaacaagaggccagacaagctataaatattatcaactgcagggagggggatgtaaaagaggaagagagaaagccatgcccttttaggttagggcctgagaaagtaggcaactttagcagtgatgttcagtgtgccgctgcatgtaggaggagaaggggcttaagagaaagaaagcccagaccagcagggaaagcaaaagaggaggaaaagcagaagtagatgcaagctgtgtggcagagactgtaggcactgccaatcttgatgatggtttcctccattgtgagaagcagtattgatttggtggggtcaggggtcatttgaaggagtctagagctgcctggttttctatggtcttagctgttagaaagtggatttcagggttggagaaaaggttcattacttaagagtgttcatgtacagtcttgaggccgatttaaatttcagataactagatagcaagccagttttcctggaaataccagtaattcagctctggcttccatgtgcacaggcacatacagtcacaactcatgcacatatgcttacttacacggacacgcaaataaatagaaccaacctttttaaaaaatgaatgccattcctcacctccctcccccagctttgagaatttgcatgattatatattttaatgcattcttttagggtgtgaatattgaaataacactagctttgtctttcagttacgagaagcagggccgtgtccgaaaagttgtgaaggctcagcagctttggtacgccatcattgagtctcagacggagacgggcaccccatacatgctctacaaagactcctgtaaccggaagagcaaccagcagaacctgggaaccatcaagtgcagcaacctgtgcacagagatagtagagtacaccagtaaagatgaggtgggtggagacactgcctagcgctcggagggactagaggtggctccttgaagtgggtgaaggaaaaagtgttcagtgttctccagcactgaagaaaaaataatgtggcagagttgttaactaagctgtgtttttaaaaatagtaatttatctgccaaaggagaacggagtgctccagggaatacagtaagagctgggtggtgctggcacatacctctaatcccagaacagagacaggcggatggatctctgagtttgaggccagcctggtctgtaacataagttccaggacagccagggctgcacagagaagccctgccttcaaaacaaaacaaaaaacctatttcagtattctgaatagtgtaactaaagtgactgttaatggatgagtagaatcggcggagtgtggaaatgccctgacatatgatgggaaaactccagttttaggggttggggatttagcttagttgtaaagaggcttcccagtaaagactagtaacacccgctagtgtcaggtgtgggtttccacacctgatagctccacaggcttgagcgctctctgacaccggaggagagatcggaagtgtgtggcctgacaccgttctttgtattgcaggttgcggtttgtaacttggcttctctggctctgaacatgtatgtcacaccagaacacacgtatgactttgagaaactggcagaagtcactaaagtcattgtccgaaatctgaataaaataattgatataaactactatcctattccagaggtatggccagatttctttgcttattggtcattattgaatccaaggtggaggacctttgtcttggtctggctgccctcagagtggtgggagagaaggaaaatgaagaggccgtgtgttagtgtagaatgtggccttctcaggtcagagatgtttacttttcttcttttcctaaatcttttggcacaaaggcacacttatcaaataaacgccatcggcccattggaattggggtacaaggtctagcagatgctttcatcctgatgaggtatccctttgagagcccagaagcccagctactaaataagcaaatctttgaaaccatctattatggagccctggaagccagctgtgacctagccaaggagtatggcccctacgaaacgtatgagggatctccagtcagcaagggtgtaagtacatggttgagattttcttctcctgtgaatgccagtaatggactgataaccaccctcctccctggaacctgggtgggggggggcgtattgggttgtgaagagatctttatagatgtagttaaggtccttgagatggattgttttggattattaaggcctagagttgttcaagggtaccctaaatccagcagtcactgttctgaaagagactctgagatttatgatattcccaaaacctgttcccactagtacattagtagaggagatagcgtattcatggtttgtgacaccagggactggaagctggggagccatctgagaattgacatccactgtctctttttttaaaacgatttagttttgaagtttattctgaataagtagaaattctaatatataattatttgaaatttgatattctcagccaaataaacagatcaaagaagcaaagataagagtatgttttattataaaaggaatgcatctcttaaaactcttcatgaatgctcagattttctagcttgaaaagtctgcagtgtggttgcagggaggccctcggctgcttctgaacaataagcttagtggaacggtgtctgagagactggagcagatacctcttaatgtggtgactacatgatgcagttgctggactgtggggatatggcagttagctacttaaaaagttttggtcattgttttgaattgccccagaatgacatcataaatgtggaatatctatttcttagattcttcagtatgatatgtggaatgttactcctacagacctgtgggactggaagcttctcaaggagaagattgcaaagtaagtagtgatgtataaagtggcatggaagccaggggactgctggggtcttctggcccttgaggaattggatatgctaagtgtaacttctgaaacttctgaaatgggactaaaatgacctactacagaaatggttttggaaagtataagaaaatagtaacatgaaagttgtttggcatggtgaaagctttttaacacatagtaggcatttcagtatgagttgacgttatttgtggaggtgaacacccatgctagtcaatttttttttttttttaaggatggtatcttatactatgtagctctggctgtcctggaacttatcacttagactgggctagcctcaaactcagagatcttcctgcctctgcctcccaagcgctggggttaaaggcatgtgccatcactgcctggcccaagtaggccttcttttttttcttttattcattgctttaatttgtgtgtgtgtgtgtgtgtgtgtgtgtgtgtgtgtgtgtgtgtgtgtgtgtgtgatgtgtgtgtgtgtgtgtgtgtgtcttttaaatagtatcttaactatatagtcctgggtggcctacaacttgctacatagaccagactggctgcaaacttgcaaaccactatgccctacactaaatacagaaataaaatagaaagtaaaaactgctttataattctgccagatgctctattcacaaaacaatcagaaatgtaatttgttttcccagagataagccttgtcggtgatgtgtttttctagacctcttacatatacatacaaatgtaaatgtgattgaatgtaacatattctgagactttttggtgtttagagatctttggtgcaggtacattttcttaataggttagcaattacagctgattctgtaattggggtagagcaagtgtgacttgagtgttttcctgtctacaaccgtgactagaatttcagatgaggcagtaaggacatgaagacctgatagcttacatctagaaagtgactgaggcttccaacccagctatacaaacctgctcaggacctgaggctcagcgctgtgcaccatatgggtccgtaagtgtagcatgtaggaaaggaaggccgtctgtattagaggagcttaactaactaactcaagcaatgcagtcaaagcatgtggtagtcaccggaaatgcttgatgaacagtatttgttttgatatttgtgttcattgcccacctgttcaggaaaaatgctatggtgttggtctctacacctctttttatttttaatatttatttattgtgtatgagtgcatgtatagtggtacacatgtgaaggtcagaggacagcttgaggagttgtttctcctaccatattgagcaacatgtatgttttatgtagtggactcaggataccgaagagatacctttacccacggggccatctttcaggccatggagttggcagctcttaggctaagctgtggagatttctaagatggtatagtcttctttttttttttttttttttttttttttttttcggagctggggaccgaacccagggccttgcgcttgctaggtaagcgctctaccactgagctaaatccccaacccccggtatagtcttcttaaacactcttggcacttaaaagtgaaaagttaactttaaaaactaatagtagatgaagtctggattttctctgagcatgattcgccctttacccaggatgaggactatagtcatacatgaccagtcctgaccatcttcacagcatcgatttacaaaggggctggcggtcatggaggcacacagaggagatgaatggggttgaatggatgtgccttgattcagatgagctgctcaggactgagttcagtttccctgggccacatagtgcattgagtgagtgctctgtgtgactcctaagtaccacagagtaagtggcatcagtggggactttaaggcttgctagcagttaaaattgcgctggttctgttggagccgtggcatccttgccgtgggctgtatcccactggagtttaatgaagtcagtgtgtgagttaaatgcctccgtgatggcgctcccagcctctgtctacaccaagtgatacacagtagttgccttcttggcgactgtggctctagcatgagtctctaataatctctctctttttaaaggtacggtataagaaacagtttacttattgccccaatgcctactgcttcaactgctcagattctggggaataatgagtccattgagccttacaccagtaacatctacactcgcagagtcttgtcaggagaatttcaggtgagaacgttataaccagctttatagaagttcttctgaaagctgagactggaagtgtactcataacctgcttacacagctagcgtgcagtacaaaaggaaccgctctgtttgtttgaaatggtctcaagtagagccgtctggctgcaaagctcgccgtgcagctgaggacagccttgaacagatcattctgtctccaggtctcaggggctgggattacaggtgtgcatcatcaggcctggcctagtcagagtcaacatgtgcctaaaattggggctcggtagttgagacagggtttctttgtttagcagccctggctgtcctggaacacactttgtagaccaggctggccttgagctcacagagatccacctgcctctgcctcctgagtgctgagactaaaggtgagcattgctaccacccagctttttgttttttggaaaagcctcattatgaagatcaggctggtctccaacttgcctccaagtggtcctcctgcctctgcttctgagtacttgattacaggtacaatatgtttcaccactggctgcacggtgttctgtattggctgcctcacatgcttcggctgggatagtgaaggtgtccgtggaagccttattacccaggcagggtggtctgtacttataattgcagcacttgggaaactgaagcaggaggcgttctagttttaggttagcctaggctacatagcacctcctcttccccatccctagctctcaagtcaggaatagccataattctccaccttggtaagtggaggtgagcggttcagaaggtcaaggttatccttggttatatggccagttccgtggtagtttgtactacataatcttagagagttaggggagcggggagatacatgctttttagatttgatagccagtgaaaatttatgtgctgcaaggtcagaaattactaattaaaacagacagacaaaatgtggatttccaggtgtcctgaaatacgtttttgtgaggtgtaggaaagttgcatttctagttactttactcgagtgttattgtctggtcactttagaaagccaaagaagaatcagtctgtaaaaacttactcagcttacacagtgctgtttcttttctttgcaaatgtcatatttctttagctttttaaaacttttttctgggtgggcacagcatgctcacgccatggacagaggacacctcctgggagttctgtccttccaccacgtgagttccagggaggaaacgcaggtcgtggggtggcacctaacctttaccggctgaactaaagagctatttcacagtgtgcttgccagtgggaatgtgcacatgtatgtgcaggtgccctggggcgtaagagcatgtgctattctcgcagaagacacaagtttggttctcatctcccataatgcaaggttcacaacaacctgtaattccagcttaaataagattggaaaaaatccagggtagacaatctgatgatctgatgtatatgtgtgtgatgaatataaaaatatgtacatacatgtatgtatacattgtagaacgtttatcacagtacatcgtttctttcataatagctgtccagaccttaagggtcttgtagctttatgtggtgaaatgttcccctcggttgtgtaagaacaatggggtttattaggggatctaataagttactcatctgccttacttattttgggctccaggcctgagacccttttgtaagagactattttatttctctatgtgttttctgctttttcttcagattgtgaatcctcacttactgaaagatcttactgagcggggcttgtggaatgaagagatgaaaaatcagattattgcctgcaatggctccattcaggtacagactggaaataacggtgctttctaggagctgagctgacattgtggtgccgtgtcccttctcccaggcggtgcatagacaaatagcctttcactgtggcctgcagattcagttaatgtctttctgcgttgtgctagagttgcacacatctgtatagagtctgtattgtttctccaatacagcaccagttcccgggttttctgcacaacctggaaattttttaaaaccttgaagtttgggttgaatttattgtaaataagtcagaaattcttacatttcttaaagcttgaaattggagttcaacttaaaaagcatgggggactgagattgacggtgtagaaggtggttatgtagcacttaacagtaaaatgactgcatttcacccacaagcatttgggtctcaggacagatgccttggctaaacattggccggcttagcaactcttccagattcccatggcaggtagtgcagcctcagtcaggttagatatctcaatacagctggccgtagacctaagaaagcctcatttattttgactctaagtgcagtgtggcgttctggctttatccaatttaagagtttatctcagtacttcctttgatcgggtccctgtgaagtcctgattgtttgtgtttctttcatttagccagctcttattttcccttcctttcctaagtatgtctaggccagtacctgttttgaccataagccagttcaagatggatgtttaaatcactgtatcacatttgtgtttggttggtaagatgagattttattgactttctaagcaacagataagcagtttgggcaaacttgctttgagcattcagatactaactcttagcagtgtcacaacccagcatcgtcgcaggcataattaatgttagttatattgctttctttaattggaattaaagcaacaacacatagttttccttttctagagcataccagaaattcctgaggacctgaagcagctctataagaccgtgtgggaaatctctcagaagactgttctcaagatggcagccgagagaggtgctttcatcgatcaaagccagtctttaaacatccatatcgctgagcccaactatggcaaactcactagtatgcacttctacggttggaagcaggttggttgggcatgctgtggaggacttaactgccagctcagaatctttcagagtggaatagtttctgctggctgccttttatatattgctatctcaaagtgttaaaacccatgagtggtttttatgccagcccaacctttctctgggttttcttgtttctgttcagcagttgtaacctgcctcatatgggtgctgggagttgagcactcgggtcctctggaagggtaggaagtgttcttaaactactgagccatcgtccagcctctgttttagatacttttactctttcagatttttcatacaatgtgttttgatcataatcacccttaacaactcccagaccccttacctttcaactcctacatctgtctgtccatctcttttagtaacctaccgcctccaatttttactgtccatatacttctggttgtgggaccagcccctggagtgttgactttctcttcctaagaatccatccttacctcctcagttaggttagggcccatgaactccatgctagaactatgactgcttgcagccagagacactgtttcattctgtcaggtctctgcctcttacagccttcctgccccaatgtactattttgtaagtctttcttcctcttcaactgacctctctgttcaaaccattttattgccatttccaaagtagcttcacactgtcaatctgctattcagaaacatccattgttcccaagtttatcccagagtatgaggtaggttacactgttgtcaactgctgtagtctgttttcccttacattcctatgtcttgacgtgtgagaggccttctgtggaattacagattgactctcttacttaggtgcttttgtctgtctgtcctgggaatccttgtgaggtatttacagtgttctgcagaaacagtctcatcccctaactggttatagactaaggcaggcatgttgttctgtacagacctgcaagtaatacacgtaaaagtgaatacaacgaaacaaaaatgtttgacattccaaagagacagtcctatttcagggatggaaacccaaggtttagctgtctattaaagcatttttcagtgcggtttatagaggaggtaaaatcacaagtttaaaaaaaaagagtttaggttggttataggaatacatttaaagattttaaaaattagttttataactgatcacatgggaattattttgaacaaaaactgtctaggtgttcttctggagttcttcctaatagctatgtttgtttcccttgtagggtttaaagactgggatgtattatttaaggacaagacctgccgctaatccaatccagttcactctgaacaaggaaaagctgaaagataaggaaaaggcactgaaggaggaagaagagaaggagaggaacacagcagccatggtgtgctctttggagaacagagaggagtgtctgatgtgtggatcctgagacaaggcctagaagagccagcgtctttccgccatagcagaccatgtgacatagataggcatagtgggtttgcttgattaagggaaagctttgccggacatttctgccaggagaagaatccttgatttgcagtactgtttctctatagtgtaaaggtcattttaaacaaaacaaaaaaccaaagccagctttgatattaggaatcaaagtacaggttttgggaatgcagaagagccttcctggaaatagtgatgttgtttaggaagtctcttctccctccagctttccctgtctgactgtctcagtttgggcaaagagctttagttcgctttgaccgatggcctagaagtaaaatcaagcaataagtcaccagctggagatctagacaaacttccatagttgttttgaaataaaaatttctaagtga

SEQ ID NO: 8 - protein, 792 aa, Rattus norvegicus
MHVIKRDGRQERVMFDKITSRIQKLCYGLNMDFVDPAQITMKVIQGLYSGVTTVELDTLAAETAATLTTKHPDYAILAARIAVSNLHKETKKVFSDVMEDLYNYINPHNGRHSPMVASSTLEIVMAHKDRLNSAIIYDRDFSYNYFGFKTLERSYLLKINGKVAERPQHMLMRVSVGIHKEDIDAAIETYNLLSEKWFTHASPTLFNAGTNRPQLSSCFLLSMKDDSIEGIYDTLKQCALISKSAGGIGVAVSCIRATGSYIAGTNGNSNGLVPMLRVYNNTARYVDQGGNKRPGAFAIYLEPWHLDIFEFLDLKKNTGKEEQRARDLFFALWIPDLFMKRVETNQDWSLMCPNECPGLDEVWGEEFEKLYESYEKQGRVRKVVKAQQLWYAIIESQTETGTPYMLYKDSCNRKSNQQNLGTIKCSNLCTEIVEYTSKDEVAVCNLASLALNMYVTPEHTYDFEKLAEVTKVIVRNLNKIIDINYYPIPEAHLSNKRHRPIGIGVQGLADAFILMRYPFESPEAQLLNKQIFETIYYGALEASCDLAKEYGPYETYEGSPVSKGILQYDMWNVTPTDLWDWKLLKEKIAKYGIRNSLLIAPMPTASTAQILGNNESIEPYTSNIYTRRVLSGEFQIVNPHLLKDLTERGLWNEEMKNQIIACNGSIQSIPEIPEDLKQLYKTVWEISQKTVLKMAAERGAFIDQSQSLNIHIAEPNYGKLTSMHFYGWKQGLKTGMYYLRTRPAANPIQFTLNKEKLKDKEKALKEEEEKERNTAAMVCSLENREECLMCGS

SEQ ID NO: 9 - DNA, 3038 bp, Rattus norvegicus
cgggtggcgggagcgggaaggagttcgtaatttggttcgtcccttctggaggagaaagtgctgtctgtccggcagtttcaacctctcggtctgagcggcccctaaggagtccaacccttcacatctgacagtcgtctctatcctatcttcgcctcggagctgctaactggtctcgaacccctcagcacttcagcttctagcggcgatgcatgtgatcaagcgagatggccgccaagagcgagttatgtttgacaaaattacatcccgaatccagaaactctgttatggactcaatatggactttgtggatcctgctcagatcaccatgaaagtaatccaaggcctatacagtggggtcaccacagtggaactggacaccctggctgctgagacagctgccaccttgactacgaagcaccctgactatgccatcctggcagcaaggatcgctgtctctaacttgcacaaggaaacaaagaaagtgttcagtgacgtgatggaggatctctacaactacataaatccacacaacggcagacattctcccatggtggccagctcaacactcgagattgttatggcccataaggatcgcctgaattctgccattatctatgaccgggatttctcttacaactactttggttttaagacactggaacggtcatatttgttgaagatcaatggaaaagtggctgaaagaccacagcacatgttgatgagggtatctgtggggattcacaaagaagatattgatgctgcaattgaaacatacaatctactttctgagaagtggtttactcacgcctctccgactctcttcaatgctgggaccaaccgcccacagttgtccagctgtttcctcttgagtatgaaagatgacagcattgaggggatttatgatactctgaagcagtgtgccttgatttctaagtctgctggaggaattggtgttgccgtgagttgtattcgggccactggcagctacattgctgggactaatggcaattctaatggccttgtgccaatgctgagagtctataacaacacagctcgttatgtggatcaaggtggaaacaagcgcccaggggcatttgctatttacctggagccttggcacctggacatctttgagtttcttgacttgaagaagaacacaggcaaggaagaacagcgcgcgcgggatctcttctttgcactgtggatcccagatctcttcatgaagcgagtggagaccaaccaggactggtcactgatgtgtcccaatgagtgtcctggtctggacgaggtctggggagaggagtttgagaagttatatgaaagttacgagaagcagggccgtgtccgaaaagttgtgaaggctcagcagctttggtacgccatcattgagtctcagacggagacgggcaccccatacatgctctacaaagactcctgtaaccggaagagcaaccagcagaacctgggaaccatcaagtgcagcaacctgtgcacagagatagtagagtacaccagtaaagatgaggttgcggtttgtaacttggcttctctggctctgaacatgtatgtcacaccagaacacacgtatgactttgagaaactggcagaagtcactaaagtcattgtccgaaatctgaataaaataattgatataaactactatcctattccagaggcacacttatcaaataaacgccatcggcccattggaattggggtacaaggtctagcagatgctttcatcctgatgaggtatccctttgagagcccagaagcccagctactaaataagcaaatctttgaaaccatctattatggagccctggaagccagctgtgacctagccaaggagtatggcccctacgaaacgtatgagggatctccagtcagcaagggtattcttcagtatgatatgtggaatgttactcctacagacctgtgggactggaagcttctcaaggagaagattgcaaagtacggtataagaaacagtttacttattgccccaatgcctactgcttcaactgctcagattctggggaataatgagtccattgagccttacaccagtaacatctacactcgcagagtcttgtcaggagaatttcagattgtgaatcctcacttactgaaagatcttactgagcggggcttgtggaatgaagagatgaaaaatcagattattgcctgcaatggctccattcagagcataccagaaattcctgaggacctgaagcagctctataagaccgtgtgggaaatctctcagaagactgttctcaagatggcagccgagagaggtgctttcatcgatcaaagccagtctttaaacatccatatcgctgagcccaactatggcaaactcactagtatgcacttctacggttggaagcagggtttaaagactgggatgtattatttaaggacaagacctgccgctaatccaatccagttcactctgaacaaggaaaagctgaaagataaggaaaaggcactgaaggaggaagaagagaaggagaggaacacagcagccatggtgtgctctttggagaacagagaggagtgtctgatgtgtggatcctgagacaaggcctagaagagccagcgtctttccgccatagcagaccatgtgacatagataggcatagtgggtttgcttgattaagggaaagctttgccggacatttctgccaggagaagaatccttgatttgcagtactgtttctctatagtgtaaaggtcattttaaacaaaacaaaaaaccaaagccagctttgatattaggaatcaaagtacaggttttgggaatgcagaagagccttcctggaaatagtgatgttgtttaggaagtctcttctccctccagctttccctgtctgactgtctcagtttgggcaaagagctttagttcgctttgaccgatggcctagaagtaaaatcaagcaataagtcaccagctggagatctagacaaacttccatagttgttttgaaataaaaatttctaagtgaaaaaaaaaaaaaaaaaaaaaaaaaaaa

SEQ ID NO: 10 - DNA, 35639 bp, Canis lupus familiaris
cgaggcgctggcggcgtcgggtaacgtcattcgagctccgtcgcgccgcttttgcgcggcttttgcgtctcgggtggcgggagcgggaaggggattcggattgtcgcgcctccgctcggtggaggaaagtgccctctggcccccaaatcagtccttgcacctgagcacccccgggaaccggacccttcgcactctacctaccaccttctcgatcccgccggcgcctcggaattgcagccccgtctcgattccctcagcgcctcagccactagccgcgatgcacgtgatcaagcgaggtgagaggccggggagggggcggcgggtcagtggggagcaggtaaagggtcgcggggctgccgccgcccccgcagttggccgcgcccgccgccgcttcggcttcccgctcggaccgccgcggcttcccgccctgtcaagccagctcggcctctggcttgcgtcagtgtcaccctcccgccccccagccggccttcgctgtgagcccccgcggcttggtcatcctgccgcctttcaaaagagtaatacctgccctttatcgagtagttactcggtagtgcgccgagcactttcccggcagtatttattagctccgcttctcaggtgaagaagctgaagtgcagagagacgttcggtgactgacgcgaggccacccagtgagtcgatggtgaggccagtgttcgaacccgtggctaacctcggagtgtaccggaaaagcctggggctgctgacctgtcctgggtcggggaggagccagaaagaagggactctgccctgcgcgggcccctgtcaatttcctgatctcttttatgagggtgaaaaagaacggatcttagacccaggcatccctggaatttgccctttgtaggagatgtgttgccctctgccccaggagtggtcccagaggagtttgggactgggactacgcatacagaatcatcagtggggaggcgcagaccacgtctgacaggatgggagctcggaagagccgaggacttgtattcttcctcaacagctgattcccattagtcttcgcgagttcctcctttttgtgccaggcctttgcttggcaatgggaaattataagaggagacagcccctgccttggcaaaaggtctaatcagattggaaaaacaagagcaaaacatacatttggcagagaaccgtatgaggcaggtctgaacaaattttgacttgaatctacttgcctctgttaaagcaataaagttacttcaaaattgtgggcacttagtactggttgactgactggatgtttcatcctctaggctgtgagtatttcaaaggtggggactttatgcccacacttagcattggacttgccctgaataggaattcaaagaatgaacaagaacagttattttaaaatataggacataatgaatgctatgggtaggcaggtggttgatttggttttgtccaggttgtttaataagagccaagaggtggagagatggacagtgatggcccctttcccagtttttagtatcttaaggacatcattctctgaatttccctagtcctccgttttagctgatgagaccaaaagaccagaatacatagtacacttttattggtccattcctgtggttgagatgagcatctagtttttttagaaaaaagtatggaaggatgaggattcccttatgataaatctgtaacaaatattaattgaaaacttgtgaacttaaattactggagtaggtaacgcccctgtgttgtacttttaattttggggtccactttgaaataccatagtttaaaaagtactgcctacaacaagctctaaaaggcaaggcatattttgtatctcattccttcagagaacataatttgaaccagatgattctctgctggattctgacaatagcattcagcacggcttgttaatatgcaaagttgtgcttgaatttatttcatttttgaaaaaaagttttaaaagattttatttatttatttgagacagaaagtgtgagggaaatagcacaagtggggaagaggggcagggggagagagagaaacagactccttgctgaacaggagcccaaagtggggctccaacccaggaccctggcagatacttaaccaactgagccacccaggtgccccttatttttgatttttaatgtgctcaggacttttctgtttctcatttttggcatgccagtgagtagcagactagctactgtcattttttgttaacgtttatgtaattatccaggaggacaatgggcggtcaatctaacttgtaccttagtcttcccccacttactcagggttttgctttccactgtttcagttacctggacaactgcgatccggaagcagatgatcctcttgagtattgtcagcaggtcaatggtagcctaactacatcacagtgcctacatctttcacctcactttgtgtcatcacatagacattgtgtcatctcacatcatcacaagaagggtgaatacagtaccacaagatagtttgagagaaagaccacatttatataacttttattataatatatagttataatagttctattttattatttattatttatctattaattaaactttatcataggtatgtatgtatagggaaaaaagtatatatagggtttagtactttctgtgatttcaggcacacattttgtaacccacagtaaaaatcacatcttacatcaggactgagaacacatcagtgtatgtgtatatgtgtgtgtataaattttcataaaatgaaacagccattttcaaaataattccttttaaagcatctctttgtactttgattctctcttctattccaaatctgttctctagcccttcatctcttttcccttatctccttccctacttttttcctaatcccctttgtagcccagtgtattattttacaaatctgtgtggatattctgctggcactgagaaacaatggcgagaaggcaaacatggttctgttttcaaagatcttaattgtgaaagatagacacatttgaaaacctaatataataaagtatgataaaaaaataaaaaaaataaagtatgataaatattctgatagctaaagtaaaggctctaggagccattcattcagttattcagaaagtgtttatttagtacttctttgtgccaggaactgttttaggtactagagattacagcaatgaacaaagcaaagtagatcccttttctcatggagtttacattcttatgtgggtgagaatggtaagtatacataagaaacaagtaaaccaaggacaaacatatggtctcattcatttggggaatataaataatagtgaaagggaatagaagggaagggagaagaaatgggtaggaaatatcagaaagggagacagaacataaagactcctaactctgggaaatgaaccaggggtggtggaaggggaggagggcggggggtgggggtgaatgagtgacgggcactgaggggggcacttgacgggatgagcactgggtgttattctgtatgttggcaaattgaacaccaataaaaaataaatttattattaaaaattttttaaaaaataatgtaaaaaaaaaagtaaacctaggaatcagttaatttcagatagtgattagggagatgatgacaagctgataataaaagtgattgagaaagtgatctaggattagataggcagggaataccctctagagctgccgtttgagctgagctctgaataatattaggggccagctatgtggagatttgtgggctgaaccttccaggtagaggggatggaaagttcataacttgtagaaaagggatatccttggtcttacggtattggcaaagtcttgctgaagagacttagagaaggcagtttatataagaggaaatcagacaattagtattctggaggatttcagaagaggaagaggtcagtttgagttagagtgcttggggcaggtcttgtggatgtgatgagagttggagattaagtaggagttagatgtatggaaaggtgaaagaggtacttttaggcagagcaaggtccaggcattgatgtggatatggggatgggaggccctgttgggacttgatatttcacagggaacaggtgaagaggtgataggggtccaaattaaggaagactttgcttgagagaagaggataatgtaggcagcaggaggcagggattaatgatgtgatgaagtcagcatcaccatttggttgcagagttcaccaaatggaatgatagtctagagaatggtcccttagaccactagtctgcctccctcttccagtgcaagttaatataatagctgttgtactttttgtcagtttcctgattaatgtggcagctacaaaatctgtttgctaatattgccttattggtcacctgtcagcttagtcagtcagttggtagagcattgaggggatagtcccagggagagccagtagtaaatttactctgttgcagagtaacactgaatatgtgagtctggtcagaaggggagatcacaataatgatcagaaagagaagggctgttttagtggtcatatatccatgcagaagaaaaagtaacttgttttattgatgataggttagtagtgatgttttaggattgatttattcttcagacagccactgagctaagtttcaacataacagatgtgaatgagaaagccaagtgtaaacacatatttaacatgttgtcctttggttactagttagaaaggattggagggacaaagcgataaactaacatttagccttttgtgtatcacagataccgtgtttgatgttttcccaataagagcagctttttaaaaatgagatacaatagttgtaattatatgaaagtttttaagacaaaaacactttttaccttatctcattttgttgtcacagtaaactgaagaagaagagatatgataattatccccattctgtaagtgacgacctgtaatgactgatcatattatgtagcttgcctaagacaagctatttactggttggttatatttgttattcttggtaggagtaaataaataaaggttggatgagctactactgaagttaaactaagaataataggactttggaaagacaaagaggaatacgttcaaagtacagaactgtaaaaggactaactagataaggtcaacatatatttgcttaccatattcccaaaatatgaaaactaagaggttgcaaagaaactgaacagaaactaagacgttgtctctagaaaattgtcttgaattatatatagaagtacttcttggggcacctgagtggttcagttgattaaacatccaactcttgattttggctcaggtcatgatctcaggatcctgggattgagccttgcatcaggctctgtgctcagcatggattctgcttgggattctctctctccctctctgcccctcccctgctcatgctctctctgtctctctaaaataaatatatacaaattttatttatttatttatttttaatattttattaaaattcaatttgccaacatataatataacacccggtgcttatcccatcaagtgccctccttagtgcccgtcacccttaccttatcccccctctctaataaataaaattaaaaagtaaaaaagaatacttctttacatggtgtgaggtacgttcaaaatcattaattgccctagaagagtatgtgagccaaatctatcatgaaggtgttagaatggagacaggttttaaatcatttaacattttgtaaatatttgagttcctactgtgggctaagacttagttcttggtcttggcactggggaatattggtaaataaaacatgccaaactctttttccttctggaagttatatgctagtggatgagtagggagactcacacagtaaacaaatacataagtaaagtatatagtatgtcagatgatatactaagtgctatagagaaaaataaagcagaagaaggatgaggataagaagagcaaagctgtgtttggggcattgcagtttaaaatagggtgattagggaaggctcattgagaagataactgaccaaagacctaaaggagtatagatagtcaggaggccagggttgccaggttagaggaagtgaagaaggtaggaaagcaggagttaaagttggggaaggggtacacaggacagattgtgtaggattctatggaatatttaatgattttgacttttattctgaaggagatgataaaccacttgaaggggttaatgaaatgattttgactgaagttttaaagagtaactctggctgccatgtgggacaaagggagaaacacttagaagcaagaatccaactgatttatatataatgtaagggaagaagggaagattttctgtatagaatccctactttttgatataaaaataatttcttgatgaatctgttggggtctgaatcttttatcagtgaaatagcatcttatgttagtcaattttaaaagtttattactgttgattacctttgattctttgacattcttatcttaatgagtgctaacatgaattgcatggtttgattcttcagatggccgccaagagcgggttatgtttgacaaaattacatctcgaatccagaagctatgttatggacttaatatggattttgttgatcctgtaagtaaatatggtattcattcattcattcattcattcatttagtttttaatatggtttatatttaaacctcgtttcatgtgattctttttactagtctcttatctcttatcattcacttgctagacatttaggttaggtattttggttatagccttgaatataaaatgtgaattcattgcttaaaacttattttctaaaacaaaccaaaacaaaacttgttttgtaacttttggtcctgttcttttcagagaactatcaaaaaaaaaaattttcagagaattataaaaaaaaaaattatcagagtgcaaagaggaaaacttaacatttcatcttattcataggtggaaaagcctgtagaaaagctgttttggagttgtggtcatttgtataggaacaagtttaaaatttgcctttttgttatctacgtagaaagagtacatttaaataatatgaagtagatttaattgacaacatttaaattaaggagaactattcagaagcaagttgctctttttctcattattttttgtaactcccctactctagaccctcatcatttctaatctggactgctgtctctagtggtccgtaaagtgtcctcctggtcttcctccaatcttgcccttttcagatatatcttacacctagcttccaaaatgatcttcgaagtggagtctctaagaaccctttttccaaacctgttcatattgcccaagccttatttaggtgttttatctgtactgctctggcacttgtgctggcttcccagcattaatcacatgatatggaaattaattatatgtctcctcacctagaatcaagagtgggcggtgtcttattcttgtaatatctgcgatgcttggcatgtatgtaattagatacttgataaatattgaattgaccaaagtgttcaaaaggaaataattttaaagttgtttaaaatatgcttattataaattctctcttatatttaggaatataaataataatataaataaatatttaggaatataaataaaatatatttatattttatttttatatttaggaattctaaacaataattagaatagtagaatggtagaattggaatgaatctgagagatcatcctatttcatcttcctgttttagagataaaggttcaaagagaaggggagtgacatacacagatgacttgttattttaccctgagttctgattacttgccatgtagcaccagaaactattcagaagacttctctactcttttactgaacataacttatctcttggatctgagaagaaagtgatcaggagtgtgggcttaggtataatataagtagaatagattataaactagtaatacacacacacacacacacacacacacacgtttgaaaggggcatgctttggttacctgggaagtgcattgatttttctgttgaattatggtgtcttttaaagattcagtaaataaaccaaaatttgtttttcttaaaaatgtatataataatttatgcattatgtcttttaaaaagaagaacctcttacaatatggtctggaaaacagtgaaatgtagtgaggttgaatgggacgtggagtaggagtcttagtaactgtgggcaagccccagtatcctgagcttcggtttctcacgtaaagtggtgatggtaataatacccatctcatatggcaactgagatgtcagtgaaaattgagctactttgtatcatgtgaagtgctaagagtagtcattaaatgatttacaccttcatctcttttaatcggaatgattaaagtttgattcatttgctttctcagactggtccttaggtagaattggcagaaaatgggtaagtttgtagctcaaaccctaatcacagagggagaatttgagtgaaagatgaggaaatactaagaaaatcactggtttgtttttaactattttcctgaggccattactctttatggaagctatactacggtttccctttgtttgatgacccctcttcattgcatatgtagtatgtatttcctagtggctctattggtttatgagttctcattactaagtttcccaaagtacaacattctgcaagataatttttcagaagagaaagttgtctgttttgtgttgataataaatttgattgttttcttcattgatctcttaaggaggctagtggtccttggggaagctcaagcaaacttatcttggttttgcttttataggctcagatcaccatgaaagtaatccaaggcttatacagtggggtcactactgtggaactggatactttggctgctgagacagctgcaaccttgacgactaagcatcctgactatgccatcctggcagcaaggattgccgtctccaacttgcacaaagaaacaaagaaagtgttcagtggtgagtctggaggaaaaagaattctcagaaaatgtatgaggctattcaaatgaaaccttaaatatcaaaagaaaagttaacatctaaaaaaaattaaaaaaaataaaagttaacatcttattttaaaaatgtacaaatgaggggcacctgagtggcttagtggttgagcatctgcttttggctcaggtgtgatcctggggtcctgggatcaagtcccgcatcatgctccccacagggagcctgcttctccctctgcccatgtctctgcctttctctctgtgtctctcatgaataaataaataaaatcttttaaaaaaatgtgcaagttagtggcagagaggggcactggaacttcttgtttctctatgctgcttacttgctgcatgagtcagtggatccttttctttttttaagcctatctttaggtggttggtggtagtgtgcttggaaaaatgagtattatttactggcaagttccgggttgaacaaaatgtcttttggcatcattagcaagcacttcataccatcactccaattttacagttcagggaatgcgagcaaaggacagttaaataatttgatcactatgtaacaagtgatatatgaaaagtcaactggtagactgagattagcaatcttttggctgtcaattccagatctattatgtggggctcaaacattatatcaccctcttcattagatttatttattacttttttaaaaaagattatttatttttgagagagagaacacaaacagggggaaagtcagagggagaagctgactcctgctgagcagggacatcctctcccccaccccaatactggactgtgtcccatgatgttgggatcatgacctgagctgaaggcagaaacttaactgactgagtcacccaggcgtccctcattggatttattgtagatatattggttatcccaaaattgatgtatagatttaagacagtcccaatcaaaatgcctgtattatgtgtgcatatataagttatatgtaaatgtggactgcctacatttacatatacctctgctatgatgtcttgaaaaagaacagagagggagggcttattaactgtggttatagaaataaaatgcttgggatgatagattataaattcaaagttgagtttttattcctttgagataaaaaaactattgagataatgatttctacttttatttattttcaaccaataattctcaatggggttggtcatcagaatcattgggaaatctttttcaaattagaagaggctatgtttaactctggaagattgtttccttaactgaggcattattatgtattttttcaacatgtatatggttatggagcactttctgtggtaggtaatgagataggttggcatgaaaaaaaaggttttagagtattatctgaggattgaatttgctgttaagtgattctgacatttatttattcaaaaaatcttttagatgtgatggaagatctctacaattacataaatccacataatggcagacattctcccatggtggccaagtcaacactggatattgttttggccaataaagatgtatgtataatgcttttctggtgaaaaatttttttacagattctttttttttttttttttttttttttaaagcaacaagcacatttaaaaaaatttaaacactacaaatggtataggtaaaaaagtaattctgccttgctgaatcctacttttctttctagggcaagaatgttttatcatatttaaatgtatttttctagagttctataatatgtgtgtgtgtttatatatatgtacatgtatatttttccttttagtggtagtgtactatgcctactgtttttgctaatacttttttcacctacaagtttacctcagaggtagttctatatcaacgtttatttttattttttatatatcagcatttatgaatttaccctattctttctaatggctgcatggccttccactttatttttttatttttatttttttttttaatttatttttgtttatttatgatagtcatacagagagagagagaggcagagacacaggcagagggagaagcaggctccatgcaccgggagcccgacgtgggattcgatcccgggtctccaggatcgcgccctgggccaaaggcaggcgccaaaccgctgcgccacccagggatccccggccttccactttatattgtcattgtacatatacataagaattgttctattgatgaatatctgttttccattttttgctgcagtgaatatccttgtatagtatgtgctttgctcatagataagtatatcagtaagataattccactcagtgaagttgcttagccaaagagtatgtgcattcaaaaattttgtaaaaaaaaaaaaaaaattagtagacattgccaaactgactcttaaaatattgagagatcttgctccacaacttaaaaattacccacctattttttttttcccacctatgtttaaacccctttcttacctagatcccacatgagaaaaggggaaagatgtgtaggtctagccagcccttttgtacatggatttttttaccatgggtatctgggcagattagaaaccagttttaaccttggatagtagaatgattgattagtcaactgtccctcaaaatatgtatctgatgttaaagagactgaaagaagaccaagttatttgtgtattgttcatatgtatgatctggaagacaaactaaaaacaaaaagaatagagcaaaacctatatttgtaaaagaaatactgataagtatttcagttctccattatttgtgcaaggcacctacctgcttttggcaacaaagatagccttaaaaatttaagagaaaaggaagggtttcatagagacttttctagtccttggccatgatcattacacagaaacactgtcagtattttgaaaaataaaattaactccatttttttctatccaaagtgtttatttgtaccagattatttttgttttcctctaaacagctttatagccaagaaaaactctgtaacaatgaccagttctgctataaatctcattataacactagtttgtttaaaacttgttaaagttttttttttgaagagccttagaattaatgtaatactaccttctgtcattgtttatcatatttattgttacatgcagtttaaaatgggctaattttaaaataaaaatatgtattaataaatatgtggtaccaatacctttagattaacaggtagtctaaagacatgtttaaggataatatgatccctcttgtgtttagttctttccttccttaattagagatgaactgtaagcataatggggaaagtttggaaaatcacattaatatttttacttatatacagcttacatttatatgttctcttctagtcttttaatataaatgttttaaacctaatttaatttatgtactattttattttccttagtgatagatataaatttctagtctagtagtgttaatctcttttatatcctgtatcaattttagttctggagtcagggctataagatcagattttgtgaaaataaatctaattatcttaactatgggtttttttgttttgttttacctctgtcagcgcctgaactctgccattatctatgaccgagatttctcttacaattactttggatttaaggtaaataatgggttttaataagtgggaattcctccttaaatcaggaaatacaggtttttattatgttttagtgacataaaggcagtaagtttgggagtctggatggacctcaggcagggattaggttaaggtggtggtggttgtttcagttaaggaaagatagcttgatgcatttgcgatttttgaattttccaaatactactccataactgagaagttatgtagatactttgttagaattattccatatttttctgtttatgtaacaattatatattcaatccctactatgtgcagaatactttttaagatacttttgtgttgataaacaatattgtatagtgtgattgagaacatgaatgttgtcagaccatcctggttcaaatctctgctcttattagcaagttactcaatctctttgtgcttcagtttcctcatctttagaatggggataataataataaaattacaataacacattctcttgagaattaaatgagtatgtgtatgtgtgtttgtgttgcttataacggtgcctagccttagaatagcacttcgtaagtattaaccataaagacgacgatgatgataaataccacaacttctgcagttaacatttatacacattaatacagagctggctttttccaggaattttcatgtagtcttttccaagaaaacagccaaccgataatgttccagactgaagccaataagagtaaataggctattcttttcatttaaaattatataaaaactgagaatatgtaaataaattgccttggggctcctgggtggctcagtccattaagcatctgctttgtctcaggtcatgatcctggggttctgggatcgagcaccatgtctggctccctgctcaagtcctgcgaggagcctgcttctcctctgcccttccccgccccctgctcgggttgactctccctcttaggtgctctgtctctttttctctcaaataaataaatttaatctttaaaaaaaatagattgccttattatgaaagatatatccattgtgtctttaaaaactatgctctggaagtgttttggttgctttgctttttctagacactggagcggtcctatttgttgaagatcaatggaaaaggtgagaaacgaacatgtttgttatgttttctattccttatattgaatatagagctctgagttattagccttaacatttctatttaaatgctaacatttttaactttaggtttggcttatgaataattgttggtgcttattggtagaaagctttttaaattatcttttggtattcctttttgactcaagtgcatgtctcagcctagtttttctaacatcccatcatttgaagctccttttgtttttagtggcagaaagaccacaacatatgttgatgagagtgtctgtggggattcacgaagaagatattgatgctgctattgaaacatacaaccttctttctgagaagtggtttacccatgcctctcccactctgtttaatgctggtaccaaccgcccacagctttctaggtatgtttcatcactagtcatttttaatgttctgaaatggttttgattagggagataaaccttgacctgaagaaatgaggcagttaatcacataaacattaatttaatgaacattgaatcactcctgttcttatcaaatgagatttgcatcctggaaagatctgcagtatcataaatgaattggagaaacaaatgctgataatgaaattttctaaagttcactgtgatgatatttgcacaactctctgaatatactaaaagctgttcattatacgctttaagtggggaattgtgtgttatggaactatatctcaataacattgttttaaaaacaaataccaaaaactaattacagggctctctaaatagtctgtacttttggattagggaagtgaagtagagattgagagagtggacagattcaggaggtatttaggaggtaaaattgacagaatttggtgatgtttttgatttggttcaaggatggttcctaagtttatgggtagagtaataggattaatggtgataccattttctgagaaagggaacactgaaacagaatctagtaatatttaaaaaaaaaataccccttagcaacattagtgtatccaggaattcaaagatatgctaatgtcaaatgttttgctaatgcaaaaactgcattaatgtaatccattgcactaacattttatactccatcaaatactctttcataaaaaaattttaacaaaatagatacagaaaataactttcttaatttttagaaatatccactaaaaacacctctgttttcagcaatgtagtagatgcttgaggtggcattgtaaggtaagaaaaaaaaaggcttgtaaatgagggaacaaaactgtgattcacagatggtatgatttttacataggaaattaatactttggcctacattttaatagaatatatatgatctcagagtggcgaaggatatcttaaaatagttataatagacaaaatagcattaaggaaaaattgactacattataattaaaaacttctgtgaaccaaaaacaaagtggaaaatcaagtttcagacctagagaagatattggcaatgtgtattaattgtgaagggattataagaaaaaaacacaaaactaataaataggaacctgggcaaaggatataaagaaataattcacagaagaaacttgactgtcaataacatgtgagatgataaactgttagtaattaggaaagtaggaaatttcctagtaattaggaaattactgttagtaattaggaaagtaacatcataatgagatatttcatatctatcagactgataaaaattaaaaggctgataataccaagtgttgctaagcatgcagaacacagggagctctcatatattgctaggtgactatacttacccattcactttggagaatctttagtaaaatgcatattttttgacccaggaattcccctcctgggtttttattctacagaaatcctcagacccaagcaccaaaagatgttcaagaatttccacagcaacattgtttagaataccaaacaaattggaaataatccaaatgtccatcgacaggcaaatggacagataatattggtatagtcatacagtggaacagcttatatcaatgaaaataaactgagagtgacatgtatcagtaggaaaaaaaatctcttaacacaatattgaattaaaagcaagttgcaaaaggataaataaatatacaaccagaaatgtaaaaatgtcaaacatatataaatgctaaaagaaggtagaaatgcatggaatggtatgggattgtaattaaactatatttgtagtgtcttttcttgaagtagatggtaagtacaaagtatatgtcatattattccctgtatatttctcagtgccagcatatttaatagaaaaagttaatggatagaatccatttgggtggatgtatattcaagatagtgaaaggattattggtagagtgaggttccaaaggtagggagcaggatgagatccaaatcacaagtcagagggcttgtcaaaaaggatctaaaggaacttatattactcagccattagaaatgacaaatacccaccatttgcttcaacgtggatggaactggagggtattatgctgagtgaaataagtcaatcggagaaggacaaacattatatgttctcattcatttggggaatataaataatagtgaaagggaatagaagggaagggagaagaaatgtgtgggaaatatcagaaagggagacagaacataaagactcctaactctgggaaacgaactagggttggtggaaggggaggaggggggtgggggtgaatgggtgacgggcactgaggggggcatttgacaagatgagcactgggtgttattctgtatgttggcaaattgaacaccaataaaaaataaatttattataaaaaaaggaactgaagttcggagggtctatcaaagaattggttgaccattggatagatgtttcttatttcataaatgtttaattttttttgccttactaataggttggaaagacctattagtgatgtatgcttaggaatttgcatgagaaaatatgataaagcacatctgcagcctcatgaacatgtcaaattagtattttatacttgattgtaagacttccttctaggcttagcatctaggatgggcagcaaggtgtttttaaattgatatgattcgttgatatgtcttgtgtcatatccagtaaaagtatttttttttccctaaaatacctaggaattttgtaaacttcaaatcctttatttgcccaatttaatgtttttggggtacatagtcaattttgtttctctgctttgtttcatttccttgctgaattgtgactttttcttcccctgtagctgtttccttctgagtatgaaagatgatagtattgaaggcatttatgacactctaaagcagtgtgcattgatttccaagtctgctggaggaattggtgttgctgtgagttgcattcgagctactggcagctacattgctggggtaagcttctgttttatgactgaaacattgtagactagagggattcaggttgagaacatgtctgctgggtctctaataagtgctagctggctgtgtgacttagagtcagtcatttcactacttatttctagctgctcgtttatattagatgatctgaaggattttttttagcttagattttgcagttcccatttattttagcaataatagtagcagctatcatttattgattgcttactatacgctaaatctgttacaaaagttttacctgagttactcatttaatccttgctacaactgtaggagatgggtaccattagagacacatagtaggaacttcactccttacaatgactttgtggttagaggcaatatcggcttcattttacgagtgaggaaactgaggcagagaaaattaaaattacttcaagagatcagtcacttaatatgtgatagagccacatattaagactctaagctttaaggctcatgctttaaacattggcatcttatgatgtgaatttagccctttactagttcactattgattgggagtcaagataaggatgttggataaaaccggggtttaaattctgtctctgctacttcctagtagtgcggcctagcagaagttattttacatctctgaatttgtttcctcacctgtaatgtgaaaaaaagatctaaccctacagaataaagttagagactagaaggaaactattatattatgtagtgttttattttttatttttatttttttaaaaagattttatttattcatgagacacacacacacacagagagagagagagagaggcagagacacaggctccatgcaaggaggctgatgtgggactcgatcccgggtctccaggatcagccccgggctgaagtgaaggcggtgctaaaccactgagccaccagggctgcccttattatgtagtgttttagagcacttagatataatagtagggtgagctattgctcacttatctttctaggcttgctttggagttaggattattttttaaattgatgagatactttctttttttttttttgatactttctagttttaggagtctctgtattttttgttcttctgctttttttttttttttttttttttaaagattttatttattcatgagaaacagaaaggcagagacagaggcagagggagaagcaggctccatgcagggagccccatgtgggccttgatcccaggatgccctgagccaaaggcagatgctcaactgctgagccactcaggcgtctcgagtattttcttattttcattctagaatccatttattgttgagaatctccatttatctttattgtctttatctgttgtatataattcttactctgagttgccttgaattcttttgggaaaaagacattgtagtagtgcttttactctacccaaagtatatccttatataatgtccattagaaggtatggagtttaaatttagctaccctgatttcagatttttttttacttgtaatgttacatctcattgtaaattagagatgcaacaacattacagcaacaattagagaaaaacatttttgttttttgtttttttaagattttatttgtttgatggagagagtataagcagggggagtggcaggccgagtgagagggagaagcagactggagcagggagcctgatgtggggcttaatcctaggaccccaggatcatgacttgagctgaaggcagacatttaatgactgagccacccaggcacccccattttgtttattttatattgagtattctgttttcaaagcaaaggagagatagaaagcaagtaaaacttagtatagactaggagaaaacttagtatagactaggagagagttattgtttgctgttgagccatttcgttcttttccttgtttagttccacttttttcctccagattgctttattcttggtctctctttcagactaacggcaactccaatggccttgtaccaatgctgagagtatataacaacacagctcgatatgtggatcaaggtggaaacaaggtatgttctgttacttgaaagtcctggaaatcagaactaaaaatctttaatcatgtatgcttcaaataagatgatttattgtttatatttctaactactctttttcacttttaaaatcaatttagagaagtataatttacttattttaaaagtgtacacacttttaagtgtagagtttgatggattttgacaaatataacatatttgtgtagttactataccaataaggatatagaacatatccattaccccagaatgtttcttcaagcacctttgattaattaccccatcacttccacctgtacatacttcatccctggttccaggcagccaattgtctagtcagcttttatttatttacttatttttatttttttattttttaagtaggctccatacccaatgtggggcttgaattcatgaccttgaggatcaagagtcacatgctctactgactgagccagccaggcaccccccagtcagcttttttatatgacagtttgttggcaaagaatttctaaagttgtgacttctattaatacctaaccttgaaaaagggttgtaatagtcttatagctttctctttaaaaaacaaaaccaaaactctgcctatttcacagagggagaagtaaagttgagaaaataggttatttacccagtgttaacagcagaataatttgcaatttgagcctgcctcagacagatatgtaggcacactaatcacctgttagtttatatatttccatagttggactttatttatttatttatttccattgatggactttaaaaatgatcattggagaccttattaagacatcacttttttatctttaataagagcacaacttaactattgtcaaggttaaagtgattttctgtgggttttgcatacctgttatataatgaaaagtgaactatatagcagctgaaaaggaagttccgtctatggttcactgtgttactttgaacaaattatttcatcttgtttttatcaattggctcttttttactcccagaattataagaacaatattactacttatatttgtagtatttttatttgtattatctcatttaattccttaattgtgaagatcaaaggagatatagaagtgctttggaaaatacaaagtttctttgattctgtttctgaaaagaatgatgaacttatttgcctttagcgacctggggcatttgctatttacctggaaccttggcatttagacatttttgagtttcttgatttaaagaagaacacgggaaaggaagaacagcgtgccagggaccttttctttgctctttggattccagatctgttcatgaaacgagtggagactaatcaggtgagaaataggtaccttttggtaagaacaacttgattcatatcagctttcttttttcatcagctttcatcttaaatcaaacttaggaagagctcacctatgtgttatgctacggaaggcactttaaaacaatttaagatatggcattcctgccctcttggatttttattctctaaagcagatgctatctgatctaaaatacttaaagggtcatgtagaaataggcagaactaggtgtttgagcctgagtccaaaatgattaattctatagcagattcccaagagagtctatggaagccatcttatcccttgcagtattcctaatggactatgcagttggttttttttttttttaagattttatttatttattcatgagaaacacattgaggagagagagagaggcagagacgcaggcagagggagaagcagtctccatgcagggagcagtctccatgcagggagccaacttgatcctgggtctccaggatcacgccccgggctggaggcagcgctaaaccgctgagccacccgggctgccctcagttggttatttgaagtctcttatgagttcttccctttgtaggactggtctttgatgtgtccaaatgaatgtcctggattggatgaggtttggggagaggaatttgaaaagctatatgaaaggtatggtaaaaatatgaaagtaataatttttaaccatgtgtttcttttatttgggggatccaaatttcaaaacatcagtcattaggcagtttctaggaatcttcagaaatatgcaggagagaatgtaattaataattttattttggtcagatttgctacctgaatcttcaccaaaatttggtttgtatcttccttcttaaaactttgggacttactttggtgctttagtttttaatcgatacttataaaaatgaaagtaaagggttattttgttttgttatacagtacatttgattgaattagttatgctttatattgcccacagaaaccaagaacagcttggacacgtgtcagtagttcattaaataatagcacagtggtagatttgaccactttagatgttattccttccttaagaacggtattgttgatatagtgggatttgagtatattctaaatgggtccaaagctgcctgattttcctctgtagctttagccacagtaaaatgaatatcctattccttttctttccccttctctcttagcaaaacatagtaaacatttaagagttttcataattttatatcttagtgtcttcaagttgtctacaataaagattttcttagggaatatttaaagtaatattagctttgcctttcagttatgagaaacagggtcgtgtccgcaaagttgtaaaagctcaacagctttggtatgccatcattgagtctcagacagagacaggtaccccgtacatgctctacaaagattcctgtaatcggaaaagcaaccagcagaacttgggaacgatcaaatgcagcaacctgtgcacagaaatagtagagtataccagcaaagatgaggtaggtagacaaacttctgcccaagtcctgagagaataatcttaggtagttattatttgtgaatccctcacttgatttcacttgagatgggggaagggagttttcatagtttgctgtaagtagaaggcactaaaatagagatgacaaaggaaagaacacgtgtgatctgtgcccttaaatatcttacagtctaaaccatgtggaaaagatgatcacttttttcttacacacacattgttgtaataatcttttcttagtgttcagttatggtggattaagacaaacacaagagaatatatcaggatgttcattcaaattaaagtatgtaaataggtagagagtccattcagtaaatggtgaggtaaaattctaatctcaaatctttaaagcaattcacagaagaggcaaggctagaaataggacatagatttgttttctttgtttgctttttaaaaaatattgtatttatttatttgagattgagcatgagctaaggagcagagggaaggggagaagaagactccccactgagcagagagctcaacacaaggctcgatcccaggaccttgggatcatgacctgagccaaaggcatatgcttaaccaactgagccacccaggcacaccagttgtttttttttgttgttgttgtttaatcttatgaaaaaattttccatttgggaagaacagcctgtcagatctgagacaggaataggttttatgcagagaatgtcaagtaagtttgttttgatggagcaaatacattatggtttggtatatggagagataggctatggctgggggaggggagatagtaggtgaaatgtctggcatgtcacagagtagaaagccctcataagttccaaaaaggaaaatagcttcaaaaggctgggatgtgaaggatagttcttgtttctggtaataattgagtgtcttgctgtgaaaggaagttggaggttagcttatggagattattatagtttttggatgacaggctgcttggatgttggatgtaaactttggagatgaggaagaaagagcagataccatctgctaggacctaaaaaacatgacaaatgaaaagtggggaagaaaatgattaagtgaattaaacatactgcagtttaatttagccagaggtagtgagcactagctataggtaaggcactgtaccaggtgctctgggatgtaaatgattatggctcaggccctgccctttagaaacttataattcattattggagaaaatataccatactcaagtaactattgtacaggatagattatgctatagagaccctcttaaaacacaaatcagaccatatcattcctccacacagcactcctctttgactttccgtcccatgcagagtttgttcattcttttttaaaattgaaatataattctcataccataaaattcatccttctaagtgcacatatcagtgttttttagtatatctacaaggttgtgtaaccgtcattaatatctaattctagaacactttccatcaacacagaaagaaaccttgtatccattagcagtagcttgccagttgccttccttccccatctctggcaactcttaatctgttttctgcctctggatttgcttcttgtggacattctgtataaacagaatcatataatatgatatggtggtctgttctatcaggcttatttcacttagcatgttttcaaggcttatctgtgttgtaatatgtattggtattttattcatttccatccagaattcctacagtgctctgagttcatgcacaactgggtatgcccatctcatctactgttagtttcctccttgctcactgtgctcccgccctataatttccagatatatcaagtacactctgtcatcaggatttatgcttttactttgttaaaatgctctcccccgccaaatagtcacatggcttgccgtctaaccttttcttttttcttttcaaagattttatttatttattcatgagacacacacacacacacagaggcagagacacaggcagagagagaagcaggttccatgccggaagcccgacatgggatttgatcttcggtctccaggatcaggccctgggccgaaggtggcactaaaccgctgagccaccccggctgcccctagcttttcatttcattgttcgtatgtctcattctcagtgaggtctttcttgtcaactctgtttaaaaatggcactccttctgtccttattcctagaacccttttgtcttttcctgccttatttctctcccttgcattcattagacttgtgtagtctgagctgtgctttaaacatgcataacgtgcagaattgagtaggtacgatgagcatgagagagtctagttgagaggagttgagattgtgggttaggatagtcataatcaaaatgaaaaagaaagtgtattcatttaacattattaagcattttttatataccagatgtgatactagtactaaaaaatataagggtaaatgaaatacaattctttcctggaaaagtttaccacctagtgtagtgtagtggaaaatcacctgaagagcttttttaaaattcacaaacttggatcccctgttgttaggggcttatcagaatctcagtgagagtaagggaggattgtataatttggaagacctttttacagtgatggaaatgtatctggtagttactgagcacatgactagtgcaactgagaaactgaatttttaattttttttaaataactatatatgactagtggctactgtattggacagcacacatctactgacagacagatacacgtaagaaattatagcacgatgggaggtatgtctggactatggaacacagattctctgtcttatctatttcactggtccatgttacaactcacatgtgaataggtactgggatttagaaatgaattatgaagaggttgaagataaagataaaaattttatagtgttagaggcttacatgatgtcattgacacagggggaagaaataaaaattgtgtgattcttgacccattttcattgcattccaggttgcagtctgtaacttggcttccctggccctgaatatgtatgttacatcagaacacacatacgattttaagaagctggctgaagtcaccaaagtcattgtccgaaacttgaataaaattattgatattaactattaccctgtcccagaggtatgaatagaggtctttgcttcttggtaattattgaaattaagttggagggagtttataatggtctgccagtcatcatttaaatggctatcattggaatgatgtgagaaaacagataaaaagagagcatgttattatttggtatagattgttgcctctcctgttcaataatgtctccttctttaaatctcctggcacaaaggcatgcttatcaaataaacgccatcgccccattggaattggggtacaaggtctggcagatgcttttattctgatgaggtatccttttgagagtccagaagcccagctactgaataagcaaatctttgaaaccatttattatggagccttggaggccagctgtgacctggccaaggagcatgggccatatgaaacctatgaaggttctccagtcagcagaggagtaagtatatggatgaaatttctttttgcctgtgagttcctatagttggctgaatggtagtcttcaaaaagatattcgcatcctaatctctggaacctatgaatgttacttttttggatttaaaaagggtctttgcagatgtaattaaggattttgaagtgagattatcctggattaccccagtgggccataaatccagtgacagtagtccttgtgagagacagaagaggaggaggcaacatgaccatggaggcagaggtgggagtgatgcatctagaacccaagaatgccagtagccactagaactgaaagagccaaagaacagaatctcctctagagcctgtggagggagtgtggccctgccaacatgttcattttgggcttctggcttccagaactatgagagaataaattttagttattttaagctgccaaatttatggtgatttgttataccagccataagaaactaatatggtacttttgctctctagagtaaaaaggatactctattttaatgtttttttttaagattttattttattgtattatttatttttagatttatttatttatttgagagagaaagagagaacaagctgagggaagagccagagagagagggagaagcaaactcccttctgagcagagagccccatgtggggctcgattccaggaccccaggatcatgacctgagccaaaggcagatgcttaactgactgagccacccagttgccccaagattatatttttaagtaatctctacacctaacatggagcttgaacttacaactctgagatcaagagttgcatgcttcacccactgagccagccagacactcctttattttaatgttttatttagaactagtcattggtaaaagtgacttaagaagaatactaactgtattagttttcttttgctaaatttagttagattaaaacaacatacattatctctattcccttgagtcaaggatgcaagcttgcctagctgggttttcttagggtctcacaaggttatactaaagctgttgataggactatggtctcctcttgagatcagagtcctttttgaagctcatctggttgttgacagaattcatttgtacttgtagaacccatgacattgtgcttcttcaaagccagtaggagggagaatctctcatttcaggaaggccccagcccaattgctcttctgagggttttcatctgatatgtgaggtctacccaggataatctttcttttctttaatcaaaattaattgataagtaacgttaattacacttgcataaacttttcacctttgccataattatgtgagtgacatccaccacattcccagttcttgtccacactcaggaggacattgtacatgtcctggcaccagggagtcaaaacttggaaactgtcttagaatctgcttcccacactgccttcattattggtagtatgagtctcttcagtgtaaaataaaatattatgttatttttagtcctggtgttcctgctgatatttaggaaatctgataactagtagtttgaaaacaggtatttaataactaaataaatcaatcaaggcaactaagaaagatggaatttttactgtacaaaaagagaatgcatctcaacaacatacttacatgaatattgggatttcctgatttgtagatataatacggatcttctgagggctcacagcagggatttggggaaaagctaaggctttaccagttttcttagcctgcttttgatcaatatgactgcatgaaagtttgtccagggaaatctttggacctttggacagttctactagaagacatttgttgggttgtggggcatggcagatagtcatttggtttttgttatggtttcaaattgttatagagtgatttatcataaatttgcattgtttgttctctagatccttcagtatgatatgtggaatgttactcccacagaactatgggactggaaacttctcaaggaaaagattgcaaagtaagcaaagagatgtaaggtagctttgaagtaaggagggttggttctcattctggctttcagaaattaggcatgttatttaaacttctgaaactcattttttctctttcaaatggggctaaaatgacctatctacagaactattttttttataaatttattttttattggtgttcaatttgccaacatatagaataacatgcagtgctcatcccgtcaagtgcccccctcagtgcccgccacccagtcacccccaccccccacccacctccccttccaccacccctagttcgtttcccacaattaccagtctttcatgttctgtctccctttctgatatttcccactcattttttctcctttcccctttattccctttcactattttttatattccccaaatgaatgagaccatataatgtttgcccatctctgattgacttatttcactcagcataataccctccaattccatccatgtcgaagcaaatggtaggtatttgttgtttctaatgactgagtaatattccattgtatacatagaccacgtcttacaggactatttctgtaaaaatactttgtaagataaatgtatgaacagtaacctacaaattgcttggtacaatgaaagcatttttaaaaaaatattttatttaaattcaatttgccaacaaacagtgtaacacccagtgctcatcatcaagtgccctcctagttcccccatccgcccaccctcataaatggtaggtactattgttagctggttatgttttaggggtttaactacctggatgaagcaattctttttctcattaaactttcatatttccaagtgtgcttgctttttatatgtttttcacttttatttgttgcttaactctactgggctcctaaatgacttttgctgaattgattgtcctaggagtaagttaaggattttggaagagcttttggagtttaatgtattaaattgtgtggtagaaaaatgtaaatcttgaggttgttaaggcttttcaaattaataaacataaaaggtttaaaggtgggaaaatgttttgcttagtgaataataaaacaaattgtttttactttcttcatgagcctatcctctctgggttaatgcatatccaaagtgatgtgtacaggaggaagcagttgctttttgtcttaaatttgtttatttgcctttaaattgttttattactaggaaaaaaatgttttaaactaggaaaatgtatgtgtgaaagggagaaaaatgaaaattatcccagtacgacctcctcctaaaaacctgtttatatctttgtctttcatttttcagaatttcttctgaatgtgtatatttacatacaaattcaacttttacaaaaagacctgtattttatttttttttccaaatactgtatagatatttttctatacataactttttagcatttcacaattaatacatgaataacaaagttcaaatatggaaataaaacagaaggtgaaagttctttttaatcctcttgtgccaactacttgttctacaaaacataagccaacttattccttttcctagaaataaacattttctagacctttttcagtacatttagagatgcacagttttgttttaaaactgtgatcaaacttgacatattctaagacttttagtgatttattttggccatcttttcttcctagtacatgcagatctacctaatgcttttaatggttacagagcattccatagtttggtatgtcctgtatagatgacttttcaaaacattttcctttctttggacaggaaatcactgtccattttactgaggaagaaagacatgaagtgagttgatcgtttgcttgatgcctcaaaactagaaagtgagaaagtgagattaagatctcagttgtatagattccattaggatatgaagctttaagctaagtactgtataaatccagaggtatagaatataagaaagataaactctatgtttgagaaacttaagactaagtaagggtaagacatgaagtataggtaaagtatatatataaaggtacaggtcatagaaaatgtttgcaggagaaatatttataactagtacttatttttaatattgtctacctggtcaggaagatgttcctagagtggtcatctcttaggctgagctttgaaggatgagctaagagcagtttgaagatttctcagtgttcagatagtatattcttccctaagcacgttctttgtcagtgagtagagtcaaaagatgttaaccttcctctctaggaacttatgattgaagaagtaatagaagtcaggaatatactttgagcataatttttccctttggagaattttggtgacatgtccgattctgaccactttcacatcattatgtttcctgaaagggcttagcacagtgatcaaatgagcacttagaaaacaatgaggattgaatgaatgtaccctgattaggactcttcaacagccatttggttatttccttggggaagctagtgtatcaagtgctaataagtcatagtgtgataagaatcgccagcagtaaaattgtgctaattttgtttaggagtttaggagaggggtgagctatatcatccatactgtgaagttgcgtctctatagcggttaaattcaagtcattatgtgagtctaatgcatgtattatgtcactcacagcatctgcatttaccccagtgacttaactagctaccttcctggcagattatagctttagtaccaacacctaataatctccttttctttaggtatggtgtaagaaacagtttacttattgccccaatgcctactgcttcaactgctcagattctgggaaataatgagtccattgaaccttataccagcaacatctatactcgaagagtcttatcaggagaatttcaggtgagaagattacgactggacctacaggagatcttgcaaaagcgtgatgttaggagtaaatgccaactcatgtttggtatgtctcttttgcttagtatgggtgcaaagctttgatacagtgagtcatcttcatctccaatattattctgtgttatttgataatagacattcaataaatatctgtgaaaagaataaatgattgaaggttgggtagaaaagtaacttcttgatattagagttcacatatttaaccattatgtaatcataattatatgcactgtaacttcagatgtttaagtcgataataactcaagatgtatatagaagcaaaaagtatatggaaccatgacaattgttttcagccttgtttacaaattagaatttctggtggataggaccagtgttttttaatgttcccagataattctaatgtgcaactagggttaagaactactaatttaaaagatttttatttgtgaatttccagatctgaaataaatttctttaagtttggagtggatacattactaatttttcttaactatttattgtatccttacttgggggagggggaattaatccccatagatttacccattttaggcaatgctagttctttttacttttgcaaatattatgtttcttgaattacagatcaagattttaaaggaatataacttttgattggtaggatgggcctctcagtcttacaagatagagaatttaccgactaatctaatgttaaatacttcttcagtgatcttatttactttaagctccaagcctgtgatcctatttaggccctgtcattcttatttattccttgacatcttggttttttattcagattgtgaatcctcacttactaaaggatcttactgagcggggcttgtggaatgaagagatgaaaaatcagattattgcatgcaatggttctatccaggtacagaatgaaaatcatgtgtgttctttagaagctacattggtaccttctcacttatcccatgcagtagagagaaaggttattcactgtggtcatttaggctatgttcacctttgcattgttgtgctaggattatatacatcttcacatagctaggcttttactgtcttgtttgtgcaataatataaagcgtagtttccaacttctctgtactttagaatcagtgggagctttaaaaattttgaagcttaggttgtactcccaaacaagtaaattagaatgtctggaaatgggagccaggcattactattttttaaagatgccctaggtcattccaaaatgcatcaaagtttgggggaccactgatataaagtgtgaaattagaaagttaaacttaattaaaaagcaaaagtggagactgaagactcaaagtccgaaaaacagagccacagatattgtttaacaatagaatatttgcagcagagaatcaagaagtatttatatgtagatggagccctctgtctaaacatttgtttccttggcaaaacagagaaggatttctctaacatttctatatttgctgacagaaattgtagcattagctagtttgtatgttttgatggcatattaaccctagacctaagaaaacattatttctattgactccgaaacaggttcgtttcattgcttccattgattttctacttgtgagttacagtcctgattacttgtgttttctttaaaactcaaggatcatttgttgctgcttagctccatcttttattaagtacctctaaaacaatgaatgttttgactataatccaaatagaaatggatcttaaatcattaccaccagccagatactttgttggttaaatgaggttttgttggtcattccaaggcagaggtgagcagtcttgggaaacttgataaggatcatattatatgatactgaatggtatggtcagatctggcaggaagaattaaggccagacccttgtgtcgttaattatgttaattatactgatttcttcagccagactgtgataaacatttggttttccttcttcagagcattccagaaatccctgatgacctgaagcaactttataagactgtgtgggaaatttcccagaaaatcgttcttaagatggcagctgaaagaggcgctttcattgatcaaagccagtctttgaacatccacattgctgagcctaactatggcaaactcaccagtatgcacttctatggctggaagcaggttggtagaggaaatcaaggaggacttgttgcctgcttgggatattttggaattggaacaatacaaattccaaatacaattttgtattctagctacttaatattgccatctagcagttcttccacttcaaatccagtatgttaaaaccaaatcatggtttttgtaccagatcaggggctcactttggatatccttgtttcttttgggattatttcattcttaggtttgaaaccttggagttacctacacttctccccttattctccatacaattactcactaagttgtggtggttgttcctttctactatttcttgaatatctttcttcctgttccattgccattattcttaatttcttaactgatctccctgtttctggtatctgctccaggctgtcttgtgcactgctatcatttctaaagtaaaactttatgcctatcaacccactattcaaaaacatccattgtttccccactttaactatctacagtataaatgccagttacctaccttggcattgccagctgtaaagtcctataatcctgtattctatccttttttacctggcagtctgctgggtatttatatagatgtatatatatttttttaatttaagagacatttattgaatacatcctgtgtactaagactgaggataccaaatagaagatatgatgatctttatccttgaaatagtcatcatctgttctttatagagacgcagtctagctccctaaatagttaaaaagcagacatgttgtcataggcaaacttggaagtcatacacataatacaaaacctagagaacaaaaatatttgacatttccaaagaggtaagcttttttagggataaaaggaatgtaatatactgtctcttttttttttcttttttaaggaagagtggacttttaaaaaagtttaaattcaattaattaacatatagtatactattaatttcagagataaagatcagtgattcatcactcttatataatacccagcactcattacatcatatgccctccatcatctagtaaccctatcctctcacccgcctcctctctggcaaacctcagtttgtttcctgtgatgaagagtctcttatggtttgtttccttttctgatttcatcttgttatatttttccctcctttcttctatgatcctctgtgctgtttcttaaattccacatatatgagtcaggtcatataattgtctttctctgattaatttatttcacttagcataatgcactctagttccatccatgttgttgcaaatggcaggatttcatatttttttgatggctgagtactattccagtgtgtgtgtgtgtgtgtgtgtgtgtgtgtgtgtgtgtatccattcatctgttgatggacatatgggctttttcataatttggctattgtggacattgctgctataaacattgccgtgcaggtgccccttcagatcactccatttgtatctttagggaaaatacctagtagtgcaattgctgggttgtagggtagctcttttcaactttttgagtaacttccatactatttccagagtgactgcacaagctggcattcccaccaaaagtataagaaggctcctctttctcctcatccttgctaaaatctgttgtttcctgatttgttaattttagccattttgaccagtgtgaagtggtatataatatagccttttatctgagaagacatttacaaatatcttctttcattctattagttgtcttttggttttgttgactgttttctttgctgtgcaaaagctttttatcttgatgaagtctcaatagttcatttttgcctttgttttccttgcctttggaatactgtttgactcttcctttaagcatttttgagaaggcttcctagaggagttggaatttcaagtttagaaaacattctgacgtggtttatggaaatgtattttaaacattggtcttgaatgtctagtgttcttacaattttttttgttttgtattcttacaatttctgatagttgtatttgcttccttgtagggtttgaagactgggatgtattacttaaggacacgaccagcagcaaatccaatccagttcactctaaataaggagaagctgaaagataaggagaaggcaacaaaagaagaagaagagaaggaaaggaacacagcagccatggtgtgctctttggagaatagagaggagtgtctgatgtgtgggtcctgaggaaaggcttagaagagaccagcacttcttcacagacaaactacttcttgagcatagataggcattgtaggtttgtttgaagtgctaaggctttgctggatctcattgcagcaaaaggatcagtcaatttaaggatcagtcaatttaaagtactgtttctatatagtgtgaaagtattgattttaaaaattggtattttgggaatcaaagtagaagttttaggagtgcaaaacaagtcaccttgcaaataaggaatgattgagtagggtttcattgcccacctggcaccccttttctggtgacctcagttttcataaggagacatggttttgctgctttgactggtgagtccatagacgcaaaactgagtcctaacctgtgagaagtgctgataggacctttctctggataaggtcctataggtcattctgaaataaacatttctaagtgattgtgtgaga

SEQ ID NO: 11 - protein, 792 aa, Canis lupus familiaris
MHVIKRDGRQERVMFDKITSRIQKLCYGLNMDFVDPAQITMKVIQGLYSGVTTVELDTLAAETAATLTTKHPDYAILAARIAVSNLHKETKKVFSDVMEDLYNYINPHNGRHSPMVAKSTLDIVLANKDRLNSAIIYDRDFSYNYFGFKTLERSYLLKINGKVAERPQHMLMRVSVGIHEEDIDAAIETYNLLSEKWFTHASPTLFNAGTNRPQLSSCFLLSMKDDSIEGIYDTLKQCALISKSAGGIGVAVSCIRATGSYIAGTNGNSNGLVPMLRVYNNTARYVDQGGNKRPGAFAIYLEPWHLDIFEFLDLKKNTGKEEQRARDLFFALWIPDLFMKRVETNQDWSLMCPNECPGLDEVWGEEFEKLYESYEKQGRVRKVVKAQQLWYAIIESQTETGTPYMLYKDSCNRKSNQQNLGTIKCSNLCTEIVEYTSKDEVAVCNLASLALNMYVTSEHTYDFKKLAEVTKVIVRNLNKIIDINYYPVPEACLSNKRHRPIGIGVQGLADAFILMRYPFESPEAQLLNKQIFETIYYGALEASCDLAKEHGPYETYEGSPVSRGILQYDMWNVTPTELWDWKLLKEKIAKYGVRNSLLIAPMPTASTAQILGNNESIEPYTSNIYTRRVLSGEFQIVNPHLLKDLTERGLWNEEMKNQIIACNGSIQSIPEIPDDLKQLYKTVWEISQKIVLKMAAERGAFIDQSQSLNIHIAEPNYGKLTSMHFYGWKQGLKTGMYYLRTRPAANPIQFTLNKEKLKDKEKATKEEEEKERNTAAMVCSLENREECLMCGS

SEQ ID NO: 12 - DNA, 3117 bp, Canis lupus familiaris
cgaggcgctggcggcgtcgggtaacgtcattcgagctccgtcgcgccgcttttgcgcggcttttgcgtctcgggtggcgggagcgggaaggggattcggattgtcgcgcctccgctcggtggaggaaagtgccctctggcccccaaatcagtccttgcacctgagcacccccgggaaccggacccttcgcactctacctaccaccttctcgatcccgccggcgcctcggaattgcagccccgtctcgattccctcagcgcctcagccactagccgcgatgcacgtgatcaagcgagatggccgccaagagcgggttatgtttgacaaaattacatctcgaatccagaagctatgttatggacttaatatggattttgttgatcctgctcagatcaccatgaaagtaatccaaggcttatacagtggggtcactactgtggaactggatactttggctgctgagacagctgcaaccttgacgactaagcatcctgactatgccatcctggcagcaaggattgccgtctccaacttgcacaaagaaacaaagaaagtgttcagtgatgtgatggaagatctctacaattacataaatccacataatggcagacattctcccatggtggccaagtcaacactggatattgttttggccaataaagatcgcctgaactctgccattatctatgaccgagatttctcttacaattactttggatttaagacactggagcggtcctatttgttgaagatcaatggaaaagtggcagaaagaccacaacatatgttgatgagagtgtctgtggggattcacgaagaagatattgatgctgctattgaaacatacaaccttctttctgagaagtggtttacccatgcctctcccactctgtttaatgctggtaccaaccgcccacagctttctagctgtttccttctgagtatgaaagatgatagtattgaaggcatttatgacactctaaagcagtgtgcattgatttccaagtctgctggaggaattggtgttgctgtgagttgcattcgagctactggcagctacattgctgggactaacggcaactccaatggccttgtaccaatgctgagagtatataacaacacagctcgatatgtggatcaaggtggaaacaagcgacctggggcatttgctatttacctggaaccttggcatttagacatttttgagtttcttgatttaaagaagaacacgggaaaggaagaacagcgtgccagggaccttttctttgctctttggattccagatctgttcatgaaacgagtggagactaatcaggactggtctttgatgtgtccaaatgaatgtcctggattggatgaggtttggggagaggaatttgaaaagctatatgaaagttatgagaaacagggtcgtgtccgcaaagttgtaaaagctcaacagctttggtatgccatcattgagtctcagacagagacaggtaccccgtacatgctctacaaagattcctgtaatcggaaaagcaaccagcagaacttgggaacgatcaaatgcagcaacctgtgcacagaaatagtagagtataccagcaaagatgaggttgcagtctgtaacttggcttccctggccctgaatatgtatgttacatcagaacacacatacgattttaagaagctggctgaagtcaccaaagtcattgtccgaaacttgaataaaattattgatattaactattaccctgtcccagaggcatgcttatcaaataaacgccatcgccccattggaattggggtacaaggtctggcagatgcttttattctgatgaggtatccttttgagagtccagaagcccagctactgaataagcaaatctttgaaaccatttattatggagccttggaggccagctgtgacctggccaaggagcatgggccatatgaaacctatgaaggttctccagtcagcagaggaatccttcagtatgatatgtggaatgttactcccacagaactatgggactggaaacttctcaaggaaaagattgcaaagtatggtgtaagaaacagtttacttattgccccaatgcctactgcttcaactgctcagattctgggaaataatgagtccattgaaccttataccagcaacatctatactcgaagagtcttatcaggagaatttcagattgtgaatcctcacttactaaaggatcttactgagcggggcttgtggaatgaagagatgaaaaatcagattattgcatgcaatggttctatccagagcattccagaaatccctgatgacctgaagcaactttataagactgtgtgggaaatttcccagaaaatcgttcttaagatggcagctgaaagaggcgctttcattgatcaaagccagtctttgaacatccacattgctgagcctaactatggcaaactcaccagtatgcacttctatggctggaagcagggtttgaagactgggatgtattacttaaggacacgaccagcagcaaatccaatccagttcactctaaataaggagaagctgaaagataaggagaaggcaacaaaagaagaagaagagaaggaaaggaacacagcagccatggtgtgctctttggagaatagagaggagtgtctgatgtgtgggtcctgaggaaaggcttagaagagaccagcacttcttcacagacaaactacttcttgagcatagataggcattgtaggtttgtttgaagtgctaaggctttgctggatctcattgcagcaaaaggatcagtcaatttaaggatcagtcaatttaaagtactgtttctatatagtgtgaaagtattgattttaaaaattggtattttgggaatcaaagtagaagttttaggagtgcaaaacaagtcaccttgcaaataaggaatgattgagtagggtttcattgcccacctggcaccccttttctggtgacctcagttttcataaggagacatggttttgctgctttgactggtgagtccatagacgcaaaactgagtcctaacctgtgagaagtgctgataggacctttctctggataaggtcctataggtcattctgaaataaacatttctaagtgattgtgtgaga

SEQ ID NO: 13 - DNA, 88443 bp, Homo sapiens
aaaatcgcgcgcggccccgcggccagcctgggtaggggcaaggcgcagccaatgggaagggtcggaggcatggcacagccaatgggaagggccggggcaccaaagccaatgggaagggccgggagcgcgcggcgcgggagatttaaaggctgctggagtgaggggtcgcccgtgcaccctgtcccagccgtcctgtcctggctgctcgctctgcttcgctgcgcctccactatgctctccctccgtgtcccgctcgcgcccatcacggacccgcagcagctgcagctctcgccgctgaaggggctcagcttggtcgacaaggagaacacggtgagcccgcggggagggcgctgcgggcaggggagggaggcagggaaagcgaagccgctcctcactcacacgcgtctccccgcagccgccggccctgagcgggacccgcgtcctggccagcaagaccgcgaggaggatcttccaggagcccacggagccggtgagtggcgggcgtggggcagaggggccagggacggccttgggcgtcttggcgccaaagccgcattgtttcctcagctgttcacactcccgccccggctcctttcccgcctaggcggcccctccccagggctgcctcccgcgcccctcggcccatttcccggttcgggcgtgcgctcctctgctgcgacccacggagtgcgacgggacagccacgttttcacatcgggccccgtgaaattgccgccaatggaaaggacttggtccagaaaaacgttagtttcatatggttcgcccggtacttaaatgttttattttctcccccaacagaaaactaaagcagctgcccccggcgtggaggatgagccgctgctgagagaaaacccccgccgctttgtcatcttccccatcgagtaccatgatatctggcagatgtataagaaggcagaggcttccttttggaccgccgaggaggtaatcggaggaccccagaagacccctgcaggggtgaccgtcacgcctcagacataaatgcacttggaggttcccgttggcaaggggggctaactgtggggcatagtaagtggtgccagcatacttaaagtttgagtgctcagtgtgagtcctgtaggctttactctcttccttttatgctaaaattgtgacttccgaacctcaggtggacctctccaaggacattcagcactgggaatccctgaaacccgaggagagatattttatatcccatgttctggctttctttgcagcaagcgatggcatagtaaatgaaaacttggtgagtttccaaaacatctttcattcatttgacgttgacgatctgaggtcgaactagttcgctttcctcgtcttgtatgtttttccatgctgagtgcatctgtgtgtgtaagctgggttttatattacatggcatttcctgttttgtaacactttgcagttctttcttatggtattttcccgactctagagaagctgagacaatattaagtggtagcaatgtgatgactctttgtggccaccacatctgccccctctttttttttttttttttgagacagagtctcactctggcccaggctggagtgcagtggtgtgatcttggctcactgcaacctccgcctcctgggttcaagcgattccccaacctcagcctcatgagtacctgggattacagacgtgcgccaccatgcctagctaatatctgtatttttagtagagacagggttttaccatgttggccaggctggtctcgaactgctgacctcaggtgatccacccaccttggcctcccaaagtgttgggattacaggcgtgagccaccacgcccggctctgctccctcctttttgtggctttgctgttttaataataatttggttgtatctcttattgcgaatggatctttcttgacataaattaattaggaaatcgagcgctcacaaatcctattttatatgtatctatttcctgatatgtaagttgagcatatgacataaaatatcaaagaattgtgacaaattggatgaaatatatatagaaataaaccttataatggtacaaagagtgcgatgctgccagtatccgttgacagttgctgctgttggttttttctcaagcttaactttgatgtgttttgccactaggtggagcgatttagccaagaagttcagattacagaagcccgctgtttctatggcttccaaattgccatggaaaacatacattctgaaatgtatagtcttcttattgacacttacataaaagatcccaaagaaaggtgagtattcaagtggtatgccaagatttttaggactcactaattgttgatttattacacatttttagttcacctagggataaaaatgactccagaatgactaagacagtcataggcattcccagcacccgtggtcatgtctgctcttagcaaggggcctaaatgcactttattattcacttagagttgtgaaggtactccttttaaagttggatgtctaccaatgtaaaaccttcttttgaaaaaattcctagatgttgggtaagacaaactaaaacctatgtctgaccatctttgctcatttggtaaagttgttgagaagctagaatgtggggctgcagtgggatggacggggaggacttgcctcctaagaagcctgcagtatagtataggcaaataagacttagtaggagttacataaggcagaggcagcagtgaaccctgagactgatttaggcatgcaggagtttggctgaataaaggtagcttaaggtctgttttgttttggagattggaggtggggggattagaaatgggctgctggagtagtctagatacaaaggtcagctttagggtggcgcgcggtggttctcgcctgtaatcccagcactttgggaggctgaagcgggcggacaatgaggtcaggagatcgagaccatcctggctaacacggtgaaaccccgtctctactaaaaataaaaaaagtggtggcgggcgcctgtagtcccagctgcttgggaggctgagacaggagaatggcgtgaacccgggaggcggagcttgcgctccagcctgggtgacagagcaagactccgtctcaaaaagcaaaaccaagcaaaaaaaacaaaggtcagctttggggaccagaaccttgtatggagtggaagtggtgaagctgcaacctaaagtagccgttgtagactttgaagtacatgaagaggaaaagtggtaacttgaaaggactgaggaaacattgggagtaaagagatttgaacatgtttataggtggaaattgagaaaagaaggcaaagattaggggtacgatcgggggcaaatgcccagaaggggaacaggaaggtctgctggggaagcctcaaaaacaagggagaggcagacccaggtctcagagagagggacagtgagatggaaagaatgaacgacagctgggcatggtagtctgagctagtagtcccagctacttggcaggctgaggcagaaggatggcttgagccctggagtttggttttaccgtgagctgtgatcatctcgctgcactctagcctgggcaacagagtgagaccctcatctctttaaaaaaaaaaaaaaaaaaaaaaaaaaaaaagctgcccaatgtctggtgcccttggcttcagaacacaaagtcatctgggtaggaacagtctgggaaatgagtagcctctcaaggtgggcaccagaataaagggaggcagaggagggtggtaagggagatccagttaactgtagtacccatggatttgctttcctgacctgggatcgacagtgtagcacagagtcctagtaggaagcaatcttagtttattggtttaattattttatgatataggtgtggcaactgaggccaaataatgcacctaatcatagtctgataatagcacagcagttaggattttatggttcttcaaatttaaattctatgattcttcaaattgaacaatgatctggacttgaaataattttaaaggcaacaaatgtccctgctgtactggactatgttttactgtctgtagaccctgaagctcaatatgaactacagaatacccaaacttgtattaatgtaaatcaagtgttgaggtttttaaaagaacactggagggaaaaactgaccagtaaaaataaaacatttcggtgtgagttcttcctttaggaagaggattggcaaatacttgaatttggcctttgtcccagagctcttatctagcagttggtaatcggaggtcttttactgtaatgcttcaattgctgataccgtatgtgcctactagggaatttctcttcaatgccattgaaacgatgccttgtgtcaagaagaaggcagactgggccttgcgctggattggggacaaagaggctacctatggtaaggagacccttgcccctacttaaacctgagcttcattttccaagtaatgttactggatttttggcccttgaataccaactcactagaatcatgttggtgttaactcctaaataggtgaacgtgttgtagcctttgctgcagtggaaggcattttcttttccggttcttttgcgtcgatattctggctcaagaaacgaggactgatgcctggcctcacattttctaatgaacttattagcagagatgaggtgagtctaagtcaaataatagggtgacctaaaccccaaacacaactcgggcatgctcttgtgttcactgacggggacctgagatgctagatggcatatatccacatttaatgtgtgagttcaaccatacacatacttgacaaaagaaggaaatactttcatttactgaaactgttttacttgcattctcaatatattgtaatacatttgtacatatgtattcccctataggctttgaatgcataaaactacaagttctttgttttttgaggtgacggaatcttgctctgtcgttccaggctggagtgcaatggcgtgatcttggctcactgcaacctctgcctcctaggttcaagtgattctcccgcctcagcctcccaagtagctgggattgtaggtgcctgccaccatgcccagctaattttcgtctttttatacagacggggtttcaccatgtttgccagactggggttgaactcctgacctcaggtgatcaggtgatccacccgcctcggcctcccagagtgctgggattataggcatgagccaccatgcccagccaaaactacaagttattgatgggattgggattttaagggatgttttattatttttgcctggtattaatatgttatccctttttccgtaaaaatgttcatagtagagccaggagcggtggctcatgcctgtaatcccagcactttggtaggccgaggcgggtggatcatgaggtcaggagattgagaccatcctggctaacacggtgaaaccccatctctactaaaaatacaaaaaattagccgggtatggtggacgtgcctattgtcccagctacttgagaggctgaggtaggagaatcgcctgaacctgggaggtggaggttgcagtgagtcaagatcacaccactgcactccagcctgggtgacagtccccccgaaaaagaatgttcatagtagccattatgtttctcctgtttgatctagaaattgcccctctacttcaatattaataagcatttcaatgaaatgagtatacattttggtctagtgtatgtctttgattaagtcacatttgaaaagccaggagcatgaactccatcttacttggagcccagtgggcaaatcaaatatggttaccttgtaggagggccttccttactggattgggagataagctgtgaagcttgatgtttaatgcagtaacttgcaaacttgatttacttgaaattgcatacaaatttcctgagcatctaaaaactagccttattactgagctttgcctttcctgctgggagtagtggcaaaattagcactcatggctgtagaaagatcactgagtgaagctctgactcctcctttgccaacacacagcagagcaagaaatacaccttgcctgtcttcatctaggtggcaactttgagggtcttgaatgggactgagcttgccttggtagtgacatcagcagagaagtcagtagttgaagtcatcttccctttgagagttcaagtgctctcagtatggctgagcatgttggataaggagaatgcagaaaaggacaaagtaatttcatattccatgttaatgacagaagtcttctggctttagtgatcttgaacttttttttctagggtttacactgtgattttgcttgcctgatgttcaaacacctggtacacaaaccatcggaggagagagtaagagaaataattatcaatgctgttcggatagaacaggtaaagtgggtgatgaaatgggtcactcaagcttgctagaaaatgcctgtgctttagttgtattcagaagctgtattttggttcctaggagttcctcactgaggccttgcctgtgaagctcattgggatgaattgcactctaatgaagcaatacattgagtttgtggcagacagacttatgctggaactgggttttagcaaggtaaagtattgtttacatagccttttgcttgttttgaagctggtgctctgtatttatatcttgatgtgaaccttttcaggttttcagagtagagaacccatttgactttatggagaatatttcactggaaggaaagactaacttctttgagaagagagtaggcgagtatcagaggatgggagtgatgtcaagtccaacagagaattcttttaccttggatgctgacttctaaatgaactgaagatgtgcccttacttggctgattttttttttccatctcataagaaaaatcagctgaagtgttaccaactagccacaccatgaattgtccgtaatgttcattaacagcatctttaaaactgtgtagctacctcacaaccagtcctgtctgtttatagtgctggtagtatcaccttttgccagaaggcctggctggctgtgacttaccatagcagtgacaatggcagtcttggctttaaagtgaggggtgaccctttagtgagcttagcacagcgggattaaacagtcctttaaccagcacagccagttaaaagatgcagcctcactgcttcaacgcagattttaatgtttacttaaatataaacctggcactttacaaacaaataaacattgtttgtactcacaaggcgataatagcttgatttatttggtttctacaccaaatacattctcctgaccactaatgggagccaattcacaattcactaagtgactaaagtaagttaaacttgtgtagactaagcatgtaatttttaagttttattttaatgaattaaaatatttgttaaccaactttaaagtcagtcctgtgtatacctagatattagtcagttggtgccagatagaagacaggttgtgtttttatcctgtggcttgtgtagtgtcctgggattctctgccccctctgagtagagtgttgtgggataaaggaatctctcagggcaaggagcttcttaagttaaatcactagaaatttaggggtgatctgggccttcatatgtgtgagaagccgtttcattttatttctcactgtattttcctcaacgtctggttgatgagaaaaaattcttgaagagttttcatatgtgggagctaaggtagtattgtaaaatttcaagtcatccttaaacaaaatgatccacctaagatcttgcccctgttaagtggtgaaatcaactagaggtggttcctacaagttgttcattctagttttgtttggtgtaagtaggttgtgtgagttaattcatttatatttactatgtctgttaaatcagaaattttttattatctatgttcttctagattttacctgtagttcatacttcagtcacccagtgtcttattctggcattgtctaaatctgagcattgtctagggggatcttaaactttagtaggaaaccatgagctgttaatacagtttccattcaaatattaatttcagaatgaaacataatttttttttttttttttgagatggagtctcgctctgttgcccaggctggagtgcagtggcgcgattttggctcactgtaacctccatctcctgggttcaagcaattctcctgtctcagcctccctagtagctgggactgcaggtatgtgctaccacacctggctaatttttgtatttttagtagagatggagtttcaccatattggtcaggctggtcttgaactcctgacctcaggtgatccacccacctcggcctcccaaagtgctgggattgcaggcgtgataaacaaatattcttaatagggctactttgaattaatctgcctttatgtttgggagaagaaagctgagacattgcatgaaagatgatgagagataaatgttgatcttttggccccatttgttaattgtattcagtatttgaacgtcgtcctgtttattgttagttttcttcatcatttattgtatagacaatttttaaatctctgtaatatgatacattttcctatcttttaagttattgttacctaaagttaatccagattatatggtccttatatgtgtacaacattaaaatgaaaggctttgtcttgcattgtgaggtacaggcggaagttggaatcaggttttaggattctgtctctcattagctgaataatgtgaggattaacttctgccagctcagaccatttcctaatcagttgaaagggaaacaagtatttcagtctcaaaattgaataatgcacaagtcttaagtgattaaaataaaactgttcttatgtcagtttcttgattggtaaaatttgcattttaattcaggaagagaaatattttttggccaggcatggctgtaatcccagcactttgggagaccaaggtaggcagatcacctgagctcaggagttcgagatcagcctggccaacatggtgacaccccatctctactaaaaatacaaaaattagcctggcatggtggcacacgcctgtaatcccagctactcgtgaggctgaggcaggagaatcacttgaacccgggaggcagaggttgcagtgagctgagattgcaccgctgcactccagcctgggcagcagagtgagactgtctgaaaaaaaaaggtgttttttgtaaaggctaacgaattcatttgctttccactggttctgggcaagagacttgccttgtgcctattggcacaaggtgtataggagacaggtacacccgaaaggtggtgcccaaaaatactaactgccatactgcacgtggggtttgtgaagccggggctgagttaacttctcaaccgtgggggagccactcctggggctcttttcccgtttgcaaaacaggtggggctagaggtcttcccagctggagttttgctctgctgtcccacatctgacctgtgtggactccagcacaggtttggattggtccctgtgtctataaaggccctttcctgactcggaatcccacccactttgataaagccttttagaattcatgacacccatccccaaacgaaccaatcattccttgtacctcacgccactgccattcagttcattgaacaaacagcagctctcttgtcaggtgacgttttctacctgcattttaattcaggaagatggggcgctaagccagaggggaggcccctccctctggagcttgggtttactcctagagaggaaaactgatagatgagtagatctgaattgttgggcagtggtgggggcagcagagaattctaaggtggatgggagtgattgggagaggtctcatggggggagatgatgtttccttagtggaggggactgggactagtgtctgaggttgtgctgcttccgactcctgtgttctcatgaagatttcttcccgtgctgctctgtaagagaaagttgtctttgagggcacagatttttatctgtctttatatttataagcataaggcctccaaggatcaggtatttaagtgactggtacatggggaaataaactaattggaactgaagtattttggggtggatggtatcttgggtaaaagtgtgatctgtgtcccagaggaacctagtagagagctttgcctttacacctaaaagtgttcagttaaggtcatttgatttgtaatgtcaggttggcgctgggcctattgcacaagttcggggcagccaggcgtcaagaagatgaccaactactaggacagcctccctgtgggtggcctgcagtctgttctgctccccccggccccatgccagctgccatgctctatagaacatgtctcccatgctgcccgaggagggcctgcagagagttgagtggtcaggctgctgagtcaattgccctgggtactcattagatacatcctccccggcctcacccccagacctactgaatcagtctgggggtaaaccagggaccctgtaatcttaatgggagatctcagacacttgagatcgggtgggatagactcctgacataaagttcaaaccagtggacgtcagtcctgggtgtgaattataatcacctgggggcttttaaaagctactaaagtctggatctcacttggggaaaaggcagccctgctgagcttcagcatgttccagatgtgttttctggtgtgttctagacatgctgtgtaagagttacacttcattgtgtgtgcacattcggggccctgcccagctgcagtggccaggcctggctgctaaaagcagacctaccaaaacctcccttcacctggtactgctgtggcctctgacctgaggactttgtcatgcaaaggaggaaccagatgggtgttctgtcacctggccagggagctaactggctgtattttgaggatcagtggccctgccagtgtcggtctggagatcctgataatggtttaactcctcttagcaagacaggcacaggcccagcccctcatccgtgagtggctgcagttggactgcgtggcctggcctcttccagcagtccctgagtatagaggggctaccctcctggtgtctgtctggacacagaagggaacacatcagtggtgtctccctgccattccctggagggaatatgacatcaggattttttttttttttttttttaatgatgagaatagctgaacccattgctgcttaaggttcagtagtcatgttcaccttagccttggctctagagactggagtggctccagcaaggtggtggactaaggaaccgaactcctcttgcttcaaacacctgcccatgataaatagcacagcaaaaagttaaataggtgggccgggcatggtggctcgcgcctgtaatcccagcactttgggaggctgaggtgggcggatcacctgaggtcaggagtttgagaccagcctggccaacatggtgagaccccatctctactaaaaatacaaaatttagccgggtgtggtggcccatgtctgtaatcccattactccggaggctgaggcaggagaatcacttgaacctgggaggcagaggttgtagtgagctgagattgcactccagcctgggcgacaagagtgaaactccatctcaaaaaaaaaaaaaaaaaaaaaagttaaatagatgatcacctcctgggaaaggagaatgacctcttttgggaacaaagaaagtgaccatggaggccccggaacttgtagcagctctccgagtggttgttagtcccttagagaaattaaatgggcaggggctgacgtgcaattggatttggagggagaggttaatctaaaccaggggaggagttgggaccaaaaccgtggcataaagctaggggccccagtgacacgggaactagacaaaaatcccattggcacagtggggaagataagggttttaatccttctggattcttaaaaaccttcacataaatttgtggtctaggaactactcaaagataaattaatccccagtattgatccctagcctggttgcacaggattcccacaggtggggttcacacttcttaattagaaactcagacaacacaacagataaaaggaaaaaacacggtatggtgaagaaatagattttcggaatcaggtagaatgggatacagcataactactagagttcaggctcttagagctatttcaacacagcttagtaagattagacatagctgaagagtggacttgtgagttggaagggatgtatctaagggaattattctaaagaagatgaaagaaagcatggagagagtggacaggcagtgtttgaggaggtaaagactggtgactttccagaatggactcatccttgagatcaggaagtccccaaggaatcacacatgagaagcaaacattcattcctagtctcatttgaatgaagctgcagaacatgaacaaaaagaacaatcattaaacgaatgtttcaacgtaagccaaaagattatgaaatcatatcttcaatgctgagggaatcattggacaaaattattattcagaaagaagatacattttcatgccaaggttttaccattcacatccccaagccaaaataattcctagcgaattgagccaaaagaggatggtgatgagcagagaaattggttggtccacagtgaatcaatagaatcaaaaggaagctgggcatcatggtgcatgcctgtgatcccagctactcacgaggctgaggtgggaggatcacttgagtccagcctgagcaacagtgagaccgaactcaaacaacaaatggaactagaataatggacgctgcagagggataaagaataccaaggtctttatactattaggccttggaggtatatggtttaaagtttaaggatgaccactggaggcatagcaccagaagatttaacttcaacttccaaagtaggggccctggtgggggaggggaggggcatgcgtgcgggtgtgggatgtgttgcagaggagttaaagcttgacgggcttagaaggtggaaagggtcgagatgcagcagagaacaagtcaatggaaagcacaaaataggatggtagaaataaaagcacagtagatgtaaataaacttaagagttaaaactcttaaggctcaaattctagctataaatgattgccaaactaaacacttaagagtgtaaacaattactataggaaaaagactttaaagcaaaaagcccattagagatagaagttattggcctaaagaatgattgttcctctgggaaaacacgatggtgataactgcaccaagcaacatggtctctgcagtgtttgggtgtgacttcatccctgcctccccagggactgatgagtcctgggctcaggctcagagtgatgaagcgggttattgtcttggtgctgccatattctcttagtcatgtgttttttttttattcattgtcctctggccctacacacagtccctaggtttgcttttatgccaattgcagagaatctccatggctctactggcaattgcttgagagctcacattcctaccggatgtgagaagatgttccatcttcctgtgtccgggcagcaccaccaaagtgcggggctggggcaagcctggatggggtagggtgtggtcaaatgactgctcacaagtgaatggtttggattatgcaacgtggccacactggaatctcaataaagggcagaggggttgaggcccagatgataccaggtgaaaagacaagacaggtttgcagcatgtgctgcgatggagatgctggggcctcctagtctggggcaggctgagccttcctgggtgtgggtgggcctccactgtgcagggtgctgtccttccaagctttggcaagatggaatctgtgttgggtgtgggtgtggccttgaaaaggcacgctgtcatctagaggccactgcttgaccccctgttgccctttatcagaggtgcgggtggctagtgcctgcaatgtcaacactgggaggccaaggggggaatccctggcttgaggccaggatttcaagaccagcctaggcaatataaggagaccctatctctatagaaaaatttttaaaaattagccatgtgtggtggcatgcatctgtagtcccggctactcaagaggctgaggcagaaggatcactggaacccaggaggttgaggctgcagtgagccatgcttgcaccactgcactctagcctgggcaacagagcaagacccactcttaaaaacaaataccctggccatagcccctgggagtctagtctccatgcaaccaggaccccatgagccacactttaaggcttttactttgggggtgaggggtgggtagaagggaggccaaaggttggggctgttgaacccatgagggtagacctgtccaagagtgaggccctgactgaggaaaggagagctgatctacagagaggctgaagcctcatcatattcattttctgagtccagtgaattctgaagtccacatcccagatgtttcacagaagtaaatcaatacattcctgataggataaggttgattttcctgccacgtgcagtcagttccaccccaacagaattcacttgatctgcacagccaccgtggggcagagatgattgcccccattttacagatatggccgggaggctcagggaggccatgtgcctcacagaggactggtctgcacaaagaccagtgggtgaccagaacttgcacctgtctacattcgtcccctcactgcatgtgcccctcttgatgggagagcaggcacctgccagccccatgctggtccgcccaaggaatggctcctaaaaccaccagctggccagtgagtcatatggaagggtttggtcatgcctacactcgtcctgcccttcctccctggtcattacactgtggtagtgggggagggtgacctctgctttgccccttgtcacctggggcaaagggtgggatcctgtccatataggaccaggggctctcttactgtctgcacttcactagtgggggccactttcagtttgcttctacctgggacgctctgggtactatgctagaaaggtagcttatggccacaaagtctagggacaggtactcacatgcccaaatggagcctcacgcttaggaatggggtgagtgggaagcagtagcttcccttggaggtggaaaacggggagatttcagtttccagaaagccctggggcagcagctgcctgggtgaggtcttccctgagcctctgagtcttccctctcctctacttcaggggggtctagcctctcctccagaaggggtgccaggacgagatgggaaggaatttgctttggaaggctgggaacaggtcctgcagctgctctggccttcctctggactgatgtgggtcccaatgttactgaagggcacttccaggtcctgttagtgcaggggccgctgcagcaaagggctgactttaggctccctctttgttttgttttgtttttgagatggagtcttgctgcgacccccaggctggagtgcagtgacgtgatctcggctcactgcaacctctgcctcccaggttcaagtgattttcatgcctcagcctcctgagcagctggaattacaggctcctgccatcatgcccggctaatttttttttttttttttgagatggagtttctcccttgttgcccaggttggagtgcaatggcgcaatctcagctcaccacaatctctgcctcccgggttcaagtgattctcctgcctcagcctcctgagtagctgggattacgggcacatgccaccatgccctgttaattttgtatttttagtagagacggggtttctgcatgttggtcaggctggtctcgaactcctgacctcaggtgatccgcctgccttggcctcccaaagtgctgggattacaaccattagccactgtgcctggccaatttttgtattttttagtagagactgggtttcaccatgttggttgggctggtctcgaactcctgacctcaagtgatctgcccatattggcctccccgtgttgggattacaggtgtgagccactgcacccggcctttcacctcccttttgaaaaactgactgctcttggagccagttctcactgcttatgaaacggttggggacatcacatcactgctctcagcctcagtttccacatcgtgaactaggatttgtaatccaggcccaacaggcttgtgagaatttagatgagtgaagtgctttcataagcaactttttcacgtgccattcagtttgcccatctaaagggtatggctcttggccaggcgtggtggctcacgcctgtaatcccaacactttgggaggccaaggtgggcggatcatttgaggtcaggagtttgagaccagcctggccaacatggtgaaaccccatctctactaagaatacaaaaattagccggacgtggtgatgggtgcctgtaatcccagctacttgggagactgaggcaggagaattgcttgagcccgggaggtggcggttgtagtgagtagaggttgcgccattgcactccagcctgggtgacagagtgagactgactcaaaaaaaataaagggtgtggttcagtggtctagtatatccacaggtatgggcagtcatctccacagttgaacatcttgcccaccccaaaaagaaagctcgtgtcccttagtcactccctgtctcccgtctgccgcctcagccctgggtagccactgagccactttctctggtttgatctggcacttctaaagtagaagttattattggcaaaggcactggctcatatttctaagagatcatttagaatgccaggggcagcagaggatgggtcttccttgcagagagaagtttgatttacatttcagaaggatctttcctggcattttaggccacttggcattaaaaagagacttgtggggcattgtctggaaggggacttttgccactgtgagctggtgacaagctgactagaagtgggggtgtcaaaggctggaatcaccacattgctgggggcggatgaggggacagttagtggatttggggtctgttctttctcatctctcttggtgacccttcccctccatcaggaaatgaggtgctgagccatctctatggtcccagccttcggttttgctctgtttggggcgtttcagagagctggactgtcccaggccccttgggaattggaagcaagtcctagaactttctggaacacagagagtggtctgttgggccttcctttgcttcctcagttcccaccctcctcctccactcctttctaggactttccttcctccacccctggatcctccaatgttaacggagcaggggtcaggaaatagcccgtgggtgggatctggttcaccgcctggttttatacataccaggagctaggaatatgttttaaaaatcaaaagaatggctgggcgtggtgtctcatgcctgtaatcccagcactttgggaggctgaggcgggtggatcaagaggtcaggagatcgagaccatcctggctaacacagagaaagcccctctctactaaaaatacagaaattagctgggcgtggtggcgggcacctgtagtcccagctacttgggaggctgaggcaggaaagtggcgtgaatccgggaggcggaggttgcagtgagccgagattgcaccactgcactccagcctgggcgacagagcaagactctgtctctaaaaaagaaaagaaaaaaaaatcaaaagaacatttcgtgttgcatgaagattctatgaaattcaaatttcagggcccataaatagcttcgttggggcgcagccacacttgtttgtttacgtatggtctgtggctgccttcaccatggataagagactggaatagctgctgtggtctgtattttctatctttacagaaaatgcttgatgagctctgagtaaggcctgaccatgttcctgagagctccgtagtggacctgatgggaaagtagtggatggcattggtggtggctgagccagcagggtgcctgctcagagagccggttattaatggagtgctaaccagtcactctagatgagaaatacacagatcacatttaaacacagggaaagctgtttacaggaaaatgataaaatagcagaacgtaaagttatgggtatactgtgcttacgttgtcataaaaatgtgtacatatggatagagaggaaggtgtcccacgtggagaaatgaaaaggtgccttagggggcaggttgggagtaagagcagtttttctttctattctatttttctgtttaaattttcctataatgttcttataataagtgttgatgagcactcgcagccaccaggggaagcagctacccaggcagaaggctattctgggtctcaggtgggctttagggagagggaccctgagctctggaccagggttaggaggaggtgccccgggcatgtggaggctggcagccctcgctcctgtgaactggcggctggggctgcatctcgcccacgtcgctgtcatgtgcggggcccacgttgtgagttgtgtgtctgctcactattgtgctgtagcctctggaagttgcttaggagcttgggatttcgtggagaggtgggagttagttgcttctgtccaaagaggtcggccaatgggggccattctgagttcagaaaccgctggcttggagcccgatggacccagccaggcccagctctgctgttgaccagttatgtgctctgggactcaggttaagtctgtgggtggcaaaactggcacctcccatcccatcttccctccatcccctccccccacccccatgtctcactctgagccttagggagttggtgccacctagctacgctcactgacacgcatctcatgctgtgctaggatgttgtccccatgttagtgtgccctctccagggagactgccagccctcgtgggtgtgcatcttctgcttctgcatccttggtcactgccagcagaggtctgggcacatggtggtggacagtggctattaactgtggttgtgctggaatggaggaggcctggtgtctggtcttggagtcaagaatgcatgtgcttaaggattccaagatcacacggaggagggtatgattagctctgggaagcggggaggcaggaaggagggcaagagacctcgacctgttcttgggaaggaaagagcaggtgagggtggggtactgttccaagcacgggaaacagagccccaggaggtggccatggcctggggctggggctggggctgggaggcggttgctccagcatgcagtcactgagccctcctgtatgcactgctgcaggtgctgggagaccgtgaagtgcaaagcagatggagtccaggccctcggggagacagcacgccagtgagggagatggagaccaatcacccacccagtgtgcggtaagtcagacggtgacaagctctgaagacaaggaaagcagggaggaaggggcgggctatgccccttgctctttcatgtggggagccagagggagccagaggatgtggggatcgaccacgtggttaggggaggaaagcatgtttcaggcggagggtgggcaagcgcaaaggccctgtggcaggcgcgtctgtgagtggtcagagcagagtgaggggtgggagatggggctgggtcagtggagtgggtgtgtacatgcaggtctgcagacccaggtaaagagtctggatttcatttctaaggggatgagaagctcgggaaggtctgaccagccttacgtcttgaaagggaatcccctgcttctgcgtgtcaggtgttactcggggtgcgccagtggaagcgggaggcagttgcagctttcaggtgagaaatgatggcaactcgcacggtgggggaagaggggccactgtggaggtggcttgcggggcctgtcatctgctgtttcctagctcagtgtacagggcccccacgcacccctgccaggtcggaaatccaggtactgccagcctctgccgttctacgtgtggccaggcgggggagcttcgccctcccatgtccctcaccccatgccccagacagcacggtcctgcgatccccctcccattccagtgctcagtatagccgtatccctgcaggctcaggcccccaccatggccagatcccccaccccaccttcaccctccgccagtccattgcacacatagcatctggaatggtctcgggcagcacctcagacgatgtggctgtgttgcatgagcccctcccctcaccgcagctctcggccctgcctgagcccaggtgcccgcgggctccccgctcacctctgccttgaaccttcctgagtctgagcttcttttttgttttgttttgtttggttttgagacagagtcttgctctgtcacccaggctgcagtgcagtggcgcgatctcgactcactacaagctctgcctcctgggttcatgccgttctccggcctcagcctcccgtgtagctgggactacaggcgcccaccacctcgcctggctaattttttgtatttttagtagagacagagtttcaccgtgttagccaggatggtcttgatctcctgacctcgtgatctgcctgccttggcctcccaaagggccgggattacaggcgtgagccaccatgcctggcctgagcctgagcttcttaaacaccacatcctctagcctcctgccttcacacaggctgttcccttagcctggactttgtccccacccacccgctcctgatctttcaggtctcaacttacaggtcactttccctgggaacctcctcagacccagtgaggccagattaggggcctcctcagagccctcatggccccaagtgtttaccacttcgctttttcatactatccaaagtgcacagaatcgtacacttttctgatgccttgttccagctgagtgccctgagggcagggatggggtccgtgtcctccggtgtgctcagccagcacctggccaggcactctcagtgttgttgaatgaatgagcgagtgagtgacccgcaggggaagctgctgtgtctgacacggtaacgtgcaggttgcactgggggggcctggttgagatcatgactggagtccctggcccccagagtgggagtcatcagtggggctcgctacctctgcacaatttttttttttctttgagacggagtcttgctctgtcgccaggtggtacagtggtacgatcttggctcactgcaacctccgcctcctgggttcaagcaattctcctgcctcagcctctcgagtagctgggactacaggtgtgcaccaccgtgtccagctaatttttgtatttgtagtagagacggggtttcaccatgttggccaggatggtctcgatcccttgatcttgtgatccgcccgccttggcctcccaaagtgctgggattacaggcgtgagccaccacacccggcccctctgcccactttcttccccttcctcctctcccgtctccaccaaggctgtctctggagtggctgtggatctgacagaatgcatgtccgctctgccatcactattcacgcacagcgcctgttggggactctcctgtaacccaagggggtagcggaaggatggagcttcaggccttgagggccaggaaatgaatgtggaagactgaatcctcaggggaccccaactctgggccgggtctggggctctgttttgaggacggggagtgggaggaggtggcagcaggagccggcgtctgaggcatctcctcacactcttccaaggtcagagacgaggtctcagatacgcttgctaatgcacgatttatttctttttcaatttcctttggaacctgtgctgtgcagatgttcacatgatgtggtggggaagtgagttttataaaactcttggcagagtaccattcggcatccctgtggttctagagatttctggggcctcggggctgtagcaccagctgcagacagctgcctgccttcttacagtgctcagcttttgggtccagcagctttctcagtcccaaacacatgtgacctcacgattctggcccttccatgatccgcaacaaactgttctggtgtgtaggtggaattcctatttttaatagccaagttgttgagaaattgtagggcttctacttccttttgaacggaagggctccggagatatttatatctttgcttctatagaatctaggaggttgtctttacccagggagggtcagcatgtggagagggtcacctgggagaggccccggtgtcagcctgcacttgccgtcagtaaatggtacgacattgagcaccaaggagctcagccagcccctcgagggaagtcctagctgcccactgggggaagggcggggaggcatgaaaacaatgaccccactggctggtgggggtgaccgtgttatgcaaagtgtacaccatgtagcatgagcaccgggccgggagcccccaaggctgctggggaatcagggagacaccaaagaggaggtggcctttcccttgaagggtaagggatctgtaggagtctgtgggagagtggaagctgcgggagggaaaggagggagggaaggaggcctggagagaggagggaggctcttgcattccaggcaggtatgggagctcctggcagagtttgcagtacccagtggctcagtgtggttggagttggctgtgggccaggtgggtgggtagacaggggccaggtctggaggggtttttagtgctgtgctgaggggtctgaagtccatcccgaaagttgtaactggggagtggcacggtggtgagttagagccacgtcattcaaactttctcaaattcccatacatagagacctagtgtgcacactcgcagcccaggcttgtgagctgcagtcgcccttgccatgtgcagctcgttctggcgtgttctgttctgcttctattctggctcatttgttctatgaacaatgctgtttgcaatcctctacattggcttcctctctccctgaatatttttgatctgcagttagaacaacactggattggcaagagggagactgaggcgggaacccaggcagaggctgctgtgagtccagctaggatgagacgtgggtgccagacagtgggcctggggcagaccccagggactccgcagtgaagaccccacctcagtggtcctgggccccaggcctcaagagacttggggcagctccctaagcagcaagaggggtcctgtcatcgtgaggcgtgttgaggatccagaagctgtggtttcataactccgtcactgtgtggtgtctgaaagccatttcattaaatgtcacatggaatcaaaatagaaattacatctctgggacaaagcccattgagccaggagccagggattctgaattggaaccagaatagcctccgaagctgggactgtggatccaaggctgcccccaccccctgggtctcgctcacatctgcactccccagagggggcaggtggtcctggagcctagcctacctgccgagagtcagaggtggctgcaggggaaccatggcagccctccttctcacactcatcctgggcaccctgcaccagcagaagggtttacatgtacaatcacccatccctagccccttctgggagggaagcatatcttacggatggcgaccttgaggctcagggaggttaaggtgccagcctgagatcacacagccagtgagaggcagagacagggcttaaactccaaacgatggctccagagccccctctcttttccatgccctgggctgcctctttccccagtgcaccttgctttttggaaccagatgaccaatgtggaaagacacgaactgattcaatcagagtgtatggagaagggacttagagaccctggtatttttaaagctccctggtaattctcatgtgcagctagggtggggcgcctctgctctgcggaatagggaaggggtgtaagtggccctgtgtctcccctctgtccccacctgccacctgctggtccatccattcagccgttgcacggacaggttgccttctgggggctgctagcccccttgcactgggcaacgctgtgtcccctctgtccctccccccagcgcatgctcctcgctctgcccctgctgcaggtgggccatgcttggagggcgcaggagagctgagatggggtggggatggatcaggccttgagagggtgcctggtaagccccgggaagggtagggaggaggaggagggagaggagagggcagtgcaagggcagcgacccccagccttgcccccgttttgagcacggggaaagtgtacacaggtagtgaggaaatgcctgcgtttgggtgcgtgttcatttctaatccattttcactttttgtgtattctttctatctactttttaaaggtttgtttcttttctaacttcctgttttagatgtatactttagtttctttatttatttttatttatttttttgagatggagtctctgttgacaggctggagcgcagtggcgtgatcttggctcactgcaacctctgcctcccgggttcaagcgattctcctgcctcagcctcctgagtaactgggattacaggcgcgcactaccacgcccagctaatttttgcatttttagtagacatggggtttcaccttgttggccaggatggacttgatctctcgaccgcgtgatctgcccacctcggcctcccaaagtgctgggattacacgtgtgagccactgggcccggcttagtttctttatttaaagataagggtttttttttgttttgttttgtttttgagacagaatctcactctgttgcccaggcaggagtgcagtggcacagttgtagctcactgcaacctcaacctcctgggctcaagtgatcctcccacctcatctgagtatcagggactacaggcatgcactaccacacccagctaatttttgtattttttttgtagagacagggtttcgccctgttgcccaggcaacaagcaaatctgcccacctcagccttccaaaatgctgggattacaggcgtgagccaccacgcccggctagagataagtttctcaaactcctgggcttaagccatccacccaccttggccttccaaaatgttgagactacaggtgtgagcctttgcattcgccttgaattcctttttcaatagtatgtttcctactaaaaacacttatgaaaagtgtgtattttctcttaccccttctccttttttgccatctaattttagattatatttcttagtgtttgtctttaaaatgtacttatacctctatgctatctttttcttatttttgccccctcccccataagaaagataaagaaatcagagacttagaccaggtgtggtggttcccgcctgtaatcccagcactttgggaggctgaggcgggtggatcactcgaggtcaggagtttgagaccagcctggccaacatggtgaaaccctgtctctagtaaaaatacaaagttagccaggcgtagtggcaggcgcctgtaatcccagctactccagaggctgaggcaggagaattgcttgaacctgggaagtggaggttgccatgagccaggatcatgccactgcactccagcctgggcaacagagtgagaccctgactcaaaaaaaaaaaaaaaaaaaaaaaaaaaaaagaaatcagatactaacaactctctccttctttcttttcttcccaatttttgtttaatgtatcatttctaaattcatggtttatatttatatatgtccttaatcctcactcacattgccctacaggtagattcattgctcactgtcagttctcttgctgaagttttcctatttttctcttgatttgctgaaattccttctccagtagtttaatcaaaagggactaaatgaaaaaaaaatattcagttattgcaagttcaaaaaggtttctagtctttgtgtttgattgacagctttccagaatataaaattcttaggccacactttctttccttgagaacttcacagatgtcacttctgtctctagagttaaatgccactgtgggaaagtctgagtctaacttctattttgttaccctttatgaattgatgttttcacttgactgtccaaagtcttttttatttagctgtttccccctttcttttatatttttagtctagttactttcatagaaattaccttgttattgacagatttttgtcattttccccaagacatggtgtgccctttcagtttgtagatttatcttcttttacttcaagaaaattttcttgaatgatatctttaaatatttatgttcccctatttgagttttctattctgggatatatgatgggtcctttgtagatcttccaaatctgtaattttctctgtaatctctttacaccgttcattttcatttccttttgctcactttcctcagtcttgttctcagtgtcttgattgtgtcttgagcaatatttgatgctcctctgcgcacctttccatttcatcatgactttgaagatacgatgtttttccttctttctccagctctgtcagctccagtttcatgttccccctgagctctcatatctgttttgtgtgcttgctttctggagaggattgctgtattcattttttttttttttttcgagatggagtcttactctgttgctcaggctggagtgcagtggtgggatctcagcttgctgcaacctctgcctcctgggatcaagcgattctcctacctcagcctcccaggtagctgggattacaggcttgcgccaccatgcccggctaattttggtatttttagtagagatggtgttttgccgtgttggctaggctggtctcgaactcctggcctcaggtgatctgcccgcctcagcctcccaaagtgctgggattgcaggtgtgagtcactgcgcccagccctgctttattaatttttgttgttgtttaattttcagcgaaaagtttgctggcaattttcatctgttctatgacaacatttttactagtgagttttcacttgccacttgtttttcctgttccttttctcgtttttattttttaattcttgcagtgtcttcctgtagatgctgcgctgtttgcttttttatttctcatctttgggcaaggtaagtttttcttcaaccatctatttgccagaggtttgtgtgggagaagaagcgaggactacacccagtgccatgtgcagttgtagggctgctcatgtgcagtctggtgattcctctttttgcctgcaagtgtggcttgtctgtgtgattgtctgtgtctgatctgctgcttctgcttcttggttccaagcttacctgtatctcacatgccactgtcatgagatcacaggccccactcctgctcatgcagataagggacgttggttggtgggcagtgtgatcccttctcactgcttcttcccaaacatctgtgtggtatttcctgcctgggcaaccctctgactcgtttctagtttgggtttcatctctcatctgtttccattggaaatggagtgtagctgggcgcagtggctcatgcctgtaatcccagcacttttggaggacgaggcgggtggattgcttgagcccaggagttcgagagcagtctggccaagaaggtgaaaccccatctctactaaaaacacaaaattagccgggcgtggtggtgcaagcctgtaatcccagcactttgggaggtcgaggcgggtggatcacgaggtcaggagatcgagaccatcctggctaacacggtgaaaccccatctctactaaaaatacaaaaaattagtcaggcacggtggcaggtgcttataatcccagctactggggaggctgaggcaggagaatcgcttgaatctgggaggtggaagttgcagtgagccgagatcacgccactgcactccaacctggcgacagagcgagactctgcctcaaaaaaaaaaaaaaaaagatggcgtttgcatcctgtttctctttctccttgttactatgggatgatttttttttttcgactttattggtgtataattgacatacaataaactgcgcctattgaatgtgttattagtaagttctgacatatgtatacacccatgcagctgtcacaaccatcagccactagacatcctgtcaccctccacagcttcctcatgctgtttcttacctccactcccattttcagacaaactgactgctttccgtcgccagagtttacattttctagaatttcatgtaaatagaatcctacagtgtgttgtgtttttttttttttttttttgatgtggtttctctcacttagcatagtttttttttcttttgagaaagagttttgctcttgttgcctaggctagagtgcaatggcgcgatctcggctcactgcaacctccacctcctgggttcaagcgattctcctgcctcagcctcccaagtagctgggattacaggtgcctgctaccacgcccgactaattttttgtatttttagtagagatggggtttcaccatgttggccaggctggtctcaaacccctgacctcaggtgatccacccgccttggcctaccattgctggaattacaggcatgcgccaccacgcctggcctagcatagttattttgaagtccatcagttgtatataacaatggttcattccttcttattgctgtgttgcatttcattgtatggctatgccatatttattcatccattcacctggtgatggacattggggctgtttccagcttttggctatgatgaatcaagttgctgccagtctgcatgtagatttttttttttttttttttgtagacagagtcttgctctgttgcccagactggagtgcagtggtgcgatcttggctcactacagcctctgcctccttggttcaagcgattctcctgcttcagcctcccaagtagctgggactacaggtgcccaccaacagcccagctaattttttttgtatttgtagtagagatggggtttcactatgttggccaggctggtcttgaactcctgacctcgtgatctgcttgccttggcctccgaaagtgctgggatcacaggcgtgagccaccacacctggccacattgctgttgaggaggtgcataggagcagaatgactgggtcatatagtaggtttcactttttaagaagtgacccaactgctcttcaaagtgaccataccgctttacatgcctctgagcacataagagcaacacaagagtcccagttgcttcatacccttgccaacacttggcatggccaatcttttacattttagccctccgagtgggtgtctagtgtatatccttgtggttttcatgtacatttcaccaataacaactggcatgagcctttttaaatgtacttattttttatatgtacaccatctttggtgaattgttcaaatcctttgcccatttattttttattttttattttattttttttttgaggcagtgtcttgctctgtcactcaggttggagtactgtggccccatctcggctcactgcaagctccgcctcccaggttcatgctattctcctgcctcagcctcccgagtagctgggactacaggcgcccgccaccacgcccagctaattttttgtatttttagtagagacaagctttcaccatgttagccaggatggtctcgatctcctgacctcgtgatccgcctgcctcggcctcctaaagtgctgggattgcaggtgtgagccaccatgcccggcccctttgcccatttaaaaatatcgagttgtgttatatattaggtttaacagctctttattctagttacacgtcttttatcagatatatgacttgtaaatattttctgtagtctgtgcccttctttttcattttattcagtgtcttttgaaaaagtaaaagacttaattttggtgaagtccaatttactgttgcttttttttcttttatagtttatgttttctgtgtactatttttttttttttttaattttttattttttgagtctcgctgtatcacccaggccagagtgcagtggtgtgatcttggctcattgcagctttggcctcctgggctcaagcagttctcccacctcagcctcccaagtagctgggattacaggcgcccgcaagcatgtgtggttaatttttgcatttttagtagatatgcagtttcaccatgttggccaggctggtctcgaactcttcacctcaggtgatttgcctgcctcggcctcccaaagtgctgggattataggcaagagccaccacacctggcccctgtgtactattcttaagaaatctttccctgtggtgaaaagggaactcttggacatggttggtgggggtgtcgattggtacagccattatggaaagcagtatggaggtttctaaataaataaaaaatagaactaccatatgactgaccaaaggaaattatatcaccaccttgtaaagatagctgcactcctgtgttaattgcagcattattcacattagccacgatatggaaacaacctaggtgttgatgaatgaagggatcaaagggccgggtgtggtggctcatgcctgtaatcccagcactttgggaggccaaagtaggtgaatcacttgaggtcaggagtttgagaccagcctagccaacattgtgaaatcctgtctctaccaaaaatacaaaaatcagctgagtgtgtgctggcgcgcacctgtagtcccagctactcgggaggctgaggaaggagaatcacttgaatctaggaggcggaggttgcagtgagccaagatcatgccactgcactccagcctgggtgacagagtgaggccctgtctccaaaaaaagatcttttttgactctgcgatacaaagatgttttcttctaggtacttcatagtttttacatttaggtctctgctgccttgttagttaatttttgtgtatggtatgaggttggagattggggtttatttttctgttctctttgagccggtttctgggaggagagagaggacccaccagctcctctgctgtgtcaagctattatacaaggccccatataggccgaggtttctgtttttttcttctctaggaaaaaaagaggaaaagccatcagcaataccaagggaaacagtaagctaagattggcatagttctcagcaagcctcacagcgattctctgctccctccctcaccccttgcctacctttaatccaaaaatgattttaccagaatgtccaacaaataagacaagacccaaaagcactgagaactttttcttgctgccaagtataaaacacagaccagtatagtggcttaaaaaagcaaattcccaggaaaatttatagagatggaaaataggacagtagaatagcagggactggggaggggagaagggagaggtgctgttgaacaggtagagtttctgtttgggctgatggaaaagttctggaaaagaaattgttgatggttgcacaagattgtgaatattcataataccattgaatggcacagttaaaaatgattaaaatggtacattgggttacctatgttttaccacaattaaagagtatttttaaaaaagcatattccctctggggttagttagctgtagtcaacacctaagttccccagtgatgaactgaagtatggaccatcagcataaatgtgaattaaaattaaatattgccaggcaggctgggcgtggtggctcacgcctgtaatcccagcactttgggaggcctaggcgggcagatcgcttgaggtcaggggttctagaccagcctggccaacatagcgagacctcgcctctactaaaataaatacaaaaattagctgggtgtggtggcacacacctgtagtcccagctacttgggaggctgaggcaggagaattgcttgaacctggtgggtggttgggtggggggtgggcgcacagaggttgcagtgagtcaagatggcatcattgcactccagcctgggtgacagagcgagactccatctcaaaaaaaaaaaaaaaaaattatcaggcagtatgaggttgcatggtcaatatcctaacagtcacaaagcaagcaagtgatcttgagggggaaagggaggaggtgggaagaaaggaggaggaccaagttccgctgagtggctaataaatattattttggttaagtccctgtctccacagagtaagtcctgattctttttttttttttttttttttgagactgtgtttcactcttgttgcccaggctggagtgcagtggcgcgatctcggctcactgcaacctctgcctcccgggttcaagtgattctcctgcctcagccttcccaagtagctgggattacaggcatgcgccaccatgcctggctaattttgtatttttagtagagacgtggtttctccatgttggccaggctggtcttgaactcccgacctcaggtgatccgcctgcctcggcctcccaaagtgctgggattacaggcatgagccactgtgcccgggctgtaagttcctgattcttaagcctaacatagttaaattgctctgtaaaaaaaaaaacagtggctttatattcaagaccatgttgcttccaactgaattggccactgacactgggatactgagcagtgaacagaccacaaggaagacatcactctcggatcctgtttgaaaccaacagctacagcaaaacactagtcttgattcagggcctaatggggtttctttaattagcaagtttacattcatggagtcttgtgaaaatggttagataaattgcagagaaataaataagtattttgtacatctgagtattattgttaatttccacctggctacatgaggctccctcctctgggttttctctctatgcccttttgctgtggacagaaggtaccttgctcattcatccatccagccggtgagccagggggcagcccggagggaggagtggaggggatgtgggcctggaattagactgagcttggtgtgtccccagctcaggccgcactgccaggccctggtttcgttactatgaaatgaggggtggggtgggtatctggtctcccactccccattactgaggggttcccgggctctcctccaccctctgattcctccccctcttctgttccagtccagaatgcctcctttctgcctaaacgcctctgatcttcatttgatcatcagcagctgcagacccatgagccactgggcctgacctgggagacactggccctccacttccagtgctctccagctggatttcctccagaacagtggcaaagagttcgcccagagctgcgtcccctccctgggaagcagcgctgagtcagggttacctggctccactgtgcccctagcgaggtgaaagttcgcacaatgacatgggctctctgttgaggataaggaggctacagcccaaggagcttgtgcaccgcaggcagagccactcaggtcatcttccagagcgggatgtctgactccagagcccgccagcccacactgctctcctgaggactgggtttctctggcctgagtctgcctgagtctacaggaagaaccctgctggcaccccagtaagcccctctagaccttggagctctaactgctctcagagctcacttttcagttagcctgtaaggcaggggtgtccaatcttttggcttcccttggccacattggaaggagaattggcttgtgtcacacataaaatacactaacactaacgatagctgatgagctaaaaacaattaaaaatcacaaactcataatgttttaagaaagtttataaatttgtgttgggccacattcaaagccgttctgggctacgggttggacaagcttgctataatggatcagagatatgtacagtcttaaagaagaaacagctcccaggcctgtaagacctatcagggcactcactgaatgctgtgagcaggggaaggggcagtcctgggcagtggggtcctctctgggggtccagctgtgtctccagtcgtctggggagctgggaacagcacaccagggttcttgcctcctgggaaagttctcacagaaagagagaacagaggtgcaaaagctaggccatgttcattattctttcattccctacttattgagctttgacaatgtgtgagggactgcttgattgattgactgattgattgggacagggtctctgtcacctaggctggagtgcagtggtgcaacctcagctccctgtaacttccgcctcctgggctcaagccatcctcctacctcagcctcctgagtagctgggattacaggcccacgccaccacacccggctactttttgtattttttggtagagacagggtttcgctatgctgccaggctggtcttgaacaaccaggctcgagtgatccttctgcctccccttgggctcccaaagtgatgggattataggcttcagccacagtgcccagccagaggaacgtttcagatgctggaatcaatggtagtgtgttggaggaagggagtttctgagctcagcccatttctttttttttttttttttttttttgagatggagtctcgctctgtcgcccaggccggactgcggactgcagtggcgcaatctcggctcactgcaagctccgcttcccaggttcacgccattctcctgcctcggcctcccgagtagctgggactacaggcgcccgccaccgcgcccggctaattttttgtatttttagtagagacggggtttcaccatgttggccagactggtcttgaactcctgacctcaggtgatctgcctgcctctgcttctcaaagtgctgggattacaggagtcagccactgcaactggccctaatagacatttttttaaactaaattattacactacagaaaaatgcacacatcataagagcacagctcgatgccttttctcaaagtgtatgcacttgtgaagtcagcctccagatggagaaagagaacatcattagcacccaggaaacccctcttggctcctcccagtcctgaccacactaaggcgcctccatctccacttccatccccagagatggccgctgctcggtgtggtactttatgcagacaggatcaaggatggtacactttttggtgcccttttttggcttgactcaacattatgcttgtgagactgtgttgcaggtagctgtaatcttttttgttgctgtagagagtattccattgtttgactatactacagtttgttcattctacccctgattggcatttgtgcatttcatttttaaaattatgaataactctattagaggcaactaatggctcagttttgctccttgctctgcaaaccaaccctgcccataggaactgaacttgtaaaggggcaggtgacgtattttagtgagaaccttccatggcgtaacctagtagaatgcctaatgttggaacctcgggcatcacagctggcctatttattttaaataaatgagttcatgaataaatgaaggaataaaggaatgaatgagaggaggggtaagtgactaaatgaatgcatttctgggaagagcattattgggtactcacctgtgtcaaacacctctggtcatcttcataaatgctgccatatgtaatccttgccacaaccctttgagatgggatggctaccttgattttacggatgaaaaaaataacaaggctcagagaatccaggtcatttaactcttctgagctctccattttcccatgtacgaaatgggtgtcagtagagctccgcagattgttgagtgggtgagggggtgatacaaagcggtcagcagttctggcacaggaaagcgctcgcgaacttcctgcgcatcattattctggcttgtgctcatgtagcctgtaagtggcctggccaggatttgaacctacagccttccatcatccccctgcacaactcctgccaccccatgctgcctgcctctgggagattaggtgagcaaaggggtcttggccatgtctttccatctgaggcactcagtacagagggtgaggggtccctgagccacctctgctgcctgccctaactccgggctgtgatgaagcagctctgttggatgaagcagccctggctccgatgctcttcctcccctcaccttccttacccaaaggatgaggttggaatacaattgcagtgtctgtgctcactaatttcattttctgtgtctggagtaataggggccctcaaacttattatgcttatttgaatttcaataataagcagccaagcgggagactggcatgggggccggggccgtgctctgaggaaggcctggctgccccagctggggaacagctgggtgcttccgaggagtggccttctctcccgggagctcggggttggtcagctggtcagctatgaccaggcagaagctgacactgacctgacccaacctgggcaggcctaggagagctcgtccccagaccttcaccttggagaaccaagtagtagtgagaacagtgccgcggggctggcccagatcatcggtcctttggacgtcttcttccataaatgagtcatttatatcacactctcttgtcaagaggtggaagtcagtttccaatggggaccaaattggccctaatttttgttcacctctggtactgagaggtaaggtgggggtgggtgacattttcaaaggggctgtatccctaaatgagataagaccactcccttgtgggtggagacacccttagcccaaaggcttgagtagttgaagagctgtaaacagtggctaccaggtgccccaggtacccagacgatgagcaaagccccagagggatccgaggaggtgacaccagcattttcccctgactggttctcgccctcagcctgggaatgtcgctgagtctttggttcttccagagacctgtcttttggctgccagcctttgcatagtgtccactcctgtatctaattctcaggagactgaggtctggcctaggcgggtctctcctccgactcagttccatgcactgaatttgacccctgggcccagatcagacacagggtctttccacgaggccctcacagaaggtggagctctgagcggtgtttttcaaacaggattttaatggtgcagcaagaaaagaaagactccaggatgactgaggtttaggcgtcactgggttgaaacggttaaagaggcttccttcctgcagggctgctcagagcctttattggccgctgtattgtgtgttcacacacacagagatggagactggagcttttccccaacactcagatctttgtttcccagaagcctctccagggagaagagcccagcgtttcagaaacgctggcttgaaggagccctgggagcctgccccccagtttctctgtagcctcacgattgtgctttctgctggtgagggaggtggctggaggtgggaagcgcccaggaggcccggctctccttgaggacacagctctgctcttaccctttgtgcttagtgcatccccagggccctcgggggaaagtccagccccctctccctgcccctccaggccctctgtgatgagtttcttccctgctcttgtgtgatttcctgtgtgcgcctacatcccaggcaaaccagggggttcctgctcttatgggctgccgtcttctgctcatgctgggctcagcctagataccctcccctacgccttgcacatagttcgggtttcacctgagctgcacccctttccaggaagccttcctgattgtcctgtgctagcttttcatttcactgctccccagcattttgtatcaaatccaaatgccttctgagctgacagcatctcactccctgacaagatgtgggcccctggggagcggtgccaaagtctggttaatcccagggtccctgctgcctgcacggagtggtgctgagtggagactccaggaaacccaagagcttcacctcgggcttgcccatcgggccctgcagctttgagcaaatcgaccgaaggtgcctactgtgtggaacccagcaaggggagccatgcagaccagggagaggaggctggcatgggcaggggctcctccctagaggctgcttggatttaaggcggttccctcatgcccagctcctctccttccttcccatattcaccatagaggtttgggtcccctctcccctctgcctctgccccaggaccacccgtgcagaccacccccgcctgccagaccagtctcagggcatctgatggcttccctgcctgctccgcccacatctcaggccaaacccctggacgtcaggacactgcaccatgcagcccactgtattttcagtctttcctggagccctgcccccgccaggtgagctggctgctttcttgggaagccaggaccttcctggccacctctgtctgccctgttgcctgcgcccctgcagtgctcccaccaggctttctgaagctggcctggccctgagacccccagccctgcctctctgtggaattgtttcctagctggtcgctccgtccttccgagcctccctctttggggctgcagaaagcgtggtctgagctacacagcactgagctccaccctgtcccaggctggtagttctttttttgttttgttttttgacacagggtctcgctctgtggcccaggctggagtgtgcgtgatctcagctcactgcaacctcccagactcaagcaatcctcccacctcagcctcccaagtagctgggaccacagacatgcaccaccatgcctgactaaatgtttgcatttttggtagagacagggtttcctcgtgttgcccaggctggtcttgaactcctgagctcaagtgatccacttgtctcgacctctcaaagtgctgcaattacaggcatgagccactgcgcctggcctggcggttctttattagcacaggtccaagactttgacttccttattgcagggcagatatggatgtgtgtgtcatgacctccaccacccgcgtgcacgaggggcacagcctcttgcaggtgtgtcacgtggcaacctggaccagggatctccccagcccagtgaggggccagcctcatctccattctacagatgagaaaaatacatacactatttaaaaacacttctatccaacacagccacacacacacattcatatgcatactcacacatgctcactcatgcactcacacatacactcacactcatgcacacacacacattcacacacacacacacacattcacatgcatgctttaactcgagggaaatgaactcacaggactctaatttcctgatgccataggaagaacaacgggcattcctgtcatgtttttcatgggaagctgattcagagaggctaaggggcatccctaacgtcacacagctaagaggcaaggctgaggtttgcacttccactgctctgacttggaagcccagtgaggcgctcaaattaaaattagaaaccttttcctgttgtccaggcagaaaaccgggagaggggagagaacagccactagggcgaggacagagcgcagccactgggcagccgggaaaccgaggcttgcgcctggctgcagacttccctcttcaggcccttctggcaccatctgctccagaacccacagctcccatccgccgctgcctgggatgaatggtgccctgtcaacagtgatacacctgctgtttagtgggaagagaggtgccaagagtgcacgggatgcccgggtgcacagaggggaggagacagggcacagccgagctgccaggccaggcacaacttcttgatgaatagagaggtgtggagccgcccgtcgttcatgtcgattctctcagtcaatcaaaacgctgccacagcaggctttgggatgcggcgtctcgatgtgtgtgggcgtgtgcagggcggttgctgatattagtcatgagcgctggcccaggaatcagagacggggatgagtctcagctctgccatttcttggctgtgtgacgtctgggccttgatttctccatatggagatagagaaccccttccttctctgtccccagaaaaagtgccggccacactctccttggcctgtcaacagcgatgcacccgctgtttagtgggaaaccatcttccttcatgaggtcaaagccctcacttttttctgggagggatgactgtgcaccgtgagttagccttagagtcaggcccaggaagacatcagccacctgcacccccccgccgccccccacccccctgccgaggcctggggagtcacagctcttcctgatcttgctgtgtggcctcgggcagggcgtttgccctctctgggcctcaggcactccatcttgacaataaggccattgcacttgctattcacattgggccacctgtgccagccatccatgacaggggttctttaggtagagacaaatggcctgcaggggcggggacccccggggcatggccgtccactgcaggtcccaggaggagccccagcctggctggctgcttccaagaatagagtagacagagtctgcacggggctgccagtgggccactcctgcacgcagggccccgggccctgagctcatcagtgaagcaggtaattatgtgtgtgctttgttcctgcacaaaggcactctcagagaacttccaagaggctctgcttccttgctgatttgattttttcagaactggagtgtgaaagtcaagctgaacctgcttaattgtgcctgcgaaggctattcagagagactgctcttggaaagaaatcaggacaattagctcttggctgcagggagagggggagcgagcgcttgatggtgaatgtcagcctgttcctgggagaaccaaagggcagagctgggcagagtggggaaaagacgggcgggggggtgggggggcatctgtagctgtctctggggctggggccaagcccaccacctgcagggggcaccaagctccacatgtgggtgtggggcagccaggctgggagcagaggccaggtccgacagcaagctcagggccactcccctcagtccagtgagggttggttgtgtgatcttgggcaagtcacatggccctctcggcctcagtttccccgggtctgcaaaatgagtgctgtgcagaatgagcagatggagcccactcatcccgggcagtggcgggtgggaactatggggtccacagcagatggtgccagaaaggcctgaagagggaagtctgcagccaggcgcgagcctcggttccccggctgcccagtggccgcgctctgtccctgccctagtggctgttctctcccctctcctggttttctgcctggacaacaggaaaaggtttctaattttaatttgagcacctcattgggcttccaagtcagagtagtggaagtgcaaacctcagccttgcctcttggctgtgtgacgttggggatgccccttagcctctctgaatcagcttcccatgaaaaagatgacaggaatgcccgttgttcttcctatggcatcaggaaattagagtcctgtgagttcatttccctcgagctaaagcatgcatgtgaatgtgtgcgtgtgtgtgtgtgtgtgcatgagtgtgagtgtgaatatgtgtgtgtgcatgagtgaacgtgtgtgtgagtgtgcatatgagtgtgtgtgtgtggctgtgttggatagaagtgtttttaaatagtgtatgtatttttcaaccttttttgaatggagcccagggtgtatttcccaaattctttttacattattttaaagagaggcagcagagtgttatgacagagaaccagctatggagctggcctgagtctgcatctgggctccacctcaccagctgtgtgtgaaaccactttgttcctgttttcttatttgtaagtagagatcatatcatctatccacatctctgcctaggtgtgtggacggcttaatacacttggaagcctcagaacaaggactggcagtaagtgctcaatacattttatcatcattgttatttttgacgctgagggtcactgtaacgaccaatgaaccagccagtgaagtgggatgaatccattcaggagcacacagggctcgggtgcactcagtgctcacgggcgaagtgagcaggctggcatctgtttggattggtctctgcttgaaccctgttagttgttaaacagtttgaatgccatcccagggtagaagagacagaaacttaagggctacttacagatgcagggactaggggagggatgtgggtgtggccagagaatccaaccctggggaccacccatttcctatctgggcggccagggccctgcaggaggtgcccccgtcacttacaagccagggcccccactgcccctccctggtcctgcagtccatctgggatgtgaggctactcaaccaagctcagtttttgcagccaggcgcacgggggaaggctgccactggctgccatcaccgactgcgaggggttcctcattctcagctggctttaccctttgctgctccttgaataaagtgttttgaattctgccgcacagaggggaccccgctttactcttttggtttccttttgcccgaacacagctcactacagcctcaacctcttgggctcaagccatcctcccaccttagcctcctgagtagctgggaccacaggtgcacatcaccacacctagctgattttttatattttgtagagacgtggtttcaccatgttgcccaggctgttctcaaactcctgagctcaagcaatccggctgcctcgacctcccaaagtgttgggattccaggcatgagccactgtgcccggcctcttttggttaccttcatcggaacacttgcagggcctttgagagaccccatcaaacacgtttccctttgggcacctacactgaatcctctgggatgaaatttcagccaggagagggactgaagtagagtcacatgtggggacctcccattagtgggctccgtagctgacggtcccaggacaggggccctgtgtggaaagaagggcagacctaagggaagccaacaggggtgaggaccacggcgcaggggccacatttaaccggctggggaccaactgtttctaaggcttccgccgctcagctgggcaaaagggagataaatattgtaaagtttacgggaaataacagttttaaacaagctctggaagtgtaatgtgcccacaggcattcatcatcatcaccgctctcatcctctcctgggtgaccagggcgatgaatgacccaaaacaccacacacgaggaaaggcaaagagatcagagactggttcacccagagagaccgggatgctgccttccaaaatggaagagctgtgctggaaaagctgcatttgactcactggaataagtgcaggggtccagggcctgctgattgcttcctggtccctgtgcacatgccccgtggtgactccgtacagtgcttcacagatcttttgctgaggagctggggatgggcagggaaggaagcctggactgggtgcctagaagctctgggcagcagccgcatcagaggcttttgaaggcaggaagggcagccagcggcccggaggggagcacagcagctgctggtgacagcttgctgggtcgtcacaggggctctggacggtccttctgccccgaggtttggcttagcttggtgagggcagcgtggaggacaccgttccatcttaatgcctttccaataaagccttgaagacgacaggccccatttcctgagcagagctgaacagttactttacacttcatctaattgattaaaatgactcctctaaattaaccaggccttccagagctgagtgcgggagagtgaagtccagagaccagagccggctgcaggggcaggccgggggcccacagcccttctcccgggccctgctgtccaccagccctgctcgcaccccaggttcctggtggccgatgcgcttaggtcagccgactggcttctgtgctctgcccctgaacaccaagctgccctgaacagagcctggtctctcagggtgagggtgggtcagggataccgcgtgtgctccctgctgtctgcgtccgtgtctggcaaattggtgaggggtcaggcatcccaggtctccttttatcttccacactgcccctgggggtagagaattatggtcccatttcacagctgaagaaactgaggcccgtctgcgatgcgtagctagcaggtgcagaggcagggatcaaggctcagcctgttgcctgcaaagccctcgccctgttccctatggcgcaccagctgcttggatgctcccacgcagcagtgccttgtcatcacattctatttgctgagcggcgatggaacaggccctgcgtccccgcctgtgtcctaagcactccacaagcatgagcgtgtctagatggtgatggtttgctcatggtctctctctcagagcttttaccctggcggggttgggagcgtggcaatgggtcaccactgaccctgttaggaaacaagtgtgtctgtacgtgccacttatgatggggacaggccgtggtcactttgctggggccagtgtcagcaggatggcagatgctttgagaacacggctaagaactctgccttctggagcaggatgtcaaatgctgtttgattcaggcatgtgacacctgtcaagagccctggcacagctgctctcgagacacgcctcgactgccactctcccacccctgcgtggcaccctcctgactgttttatctgccttggtttttctgggtctggtgtagcacctgccccataagaagcgctcagtaaatgattgttgataaaagattgaaccaatcaaggaatgatgagccagtgaagggcaaatgactggaagcaaaaggccctcttgatggaattgggaagaagctgatccgagggcccaggacagccttctcttgaatgccctgctgctgaggtctcactgctcggcttggactcgcctctcgccctgcctggctgcagaggacaaacagtggggtggtgggtgtgtgtccgtgcctgtgcgtaggatgtggtagctggtgagtgtcagggctctgcacgctgcgccctgccttgcttctttctctcctctcaggctgtgtgtagtcctgggccaggttttttcagcgggcgtggtggtgggaaggtcctctgtcccttgctcatcctgtgtcctggctcttcctccttgtgtcttctctctgggccaggaggaagtggagaggtgggatcagggccgatgtccccagcctgggtggcagtgtactggaccatgggttcccacccagaactcttcatggcagagacctatggcctgcctgtcctcatctgaagataacttggccgttctgatttctcttcccacacaaggccatggtggctgcctctgagatttaataagcccttaggtcaaatgtctgcttggccagaggaattgtctcccgggctttcttggagacagctctaaagcatgcaaactatagtgtcaggaggaaaagctcttcctctacctactttgttctgtgtttgggggtctgagaaatttaacagtcaacagatcaacagtagaaaagacaaaggcttttctgttttttttttttttttgccttaagcaaaaatcctgctaggttggtttagccagagccccctcattcctggtgtttccccttagtagtttttcctccactgatccccaccctgctccggctattaattcctacttttccttgctgtatatgtggctgagcccaacctctctccccaactgcagaatcgcatcacagtgggtcctatacctaaggcgatagttccttccccccacccctgacacccccaataaaatgtgccttcttaccatcattaacaagcatcattgaataattttgatttaatagcgggttcgagagatctcctccatcttcatcctggcagggcttcccctccaccccagaaaggaatttatggcagtttcgctctgggcctccttcctgggagtgaagctgcctcttcttgaagagggggtttatggcagcctcactcccagaagtttctgcttttagtcagataagggaaactccaaaaatgcttctttctggatctgttgaatctcaaatgtcttcagtttaaaataatcttgataccaactctgggggttggggtgggtctcacaccactctcctatgcatccctacctgctaaaaagatgtgccggctctggcctggccggctcctccaccttccagccacctgtcctgtttattcatttcttccctctcttttctccttttcttttccatttatccagtcattccttccttctacccacccaccaacctgatcacccactcattcttctctccttcaatccaacctttcctcagtacccaacctgtgcaactgtaccatggactccttcaggcagtggctcccaactcccatcacagagcaaatgctcaacacacacccgtgtttcatctgttattcaacaaacactgatcacttgcttctcttaattattattataatatttatttatttatttagagacagggtcttgctctgtcacccaggctggagtgcagtggtacaatcacagctcactgcagcctccacttcccaggctcaagccatccttccacctcagccttccaagtagctgggactacaggcacatgtcaccatgcccagctactttttgtatttttttttttttttgtagagatggggtctcacagtgttgcccaggctagttttgaactcccgggctcaatcctcctgcctcagcctcccacagtgctgggattacaggtgtgcgccactgtgcccagctgcttctctttgtaagttcccaagttgaagcacccccttcaggtgtagttttagacgtgcaacatgaggggaaatcttaggttaattgctgggtccagaattgctctgaaagacaaagactgtctttgttctagaaaagtgctcataggcgctgtgaaggccttgatgtcctctggtgccaacgcaacagagaagccagcaaaatgctctgcatgggacaggttctggtttttgctacagagactgtaagagatgcaaagccaggacggtgagggtgagctggggttggggaggcgcaggggggctccccagcagagggagggcatttgaagacggcggctgctccttggaagctggcaggcacggccacagaatatgcgcccctttcctggccccctcgaggtctgcacagccctgagtgctcatgccatgaaaatgagtgtctctgagtttggagagctggcctccgcactgggcttcctgaggacgggagcaggagcaggaggctgaggccaggggggatggcagcccccggggatctgaggaagtctgggagctggctttgaacttctgcccacgctggaacttggggagaagagggagatgtgagtcaggttttcctagttcctgagggcctgggaggccttggctggcatcccgtttacatagcgagtggccccacctgatggttctgatccagattctggtacccgagtgagctaggccacgggagcagctgatgcccctgctgtccctgaaggcagcatgggaggcccccgggactggggctcaggctttccagagagaaggaggtgcctttccctgccaacttcctagctttaagtcacgctccggacatccagagtgagcacctgcacctgccagaaccccttgagccgcctctaccttccaggatgacccattcccagttttcccaattacctttcatatttcctctttggaaatggaatttgattttgaggctgagcaggtggctggagacatagaacataaatatatcatgacttgggagttgacttgcttatcatggaaataaatgtcctccctcctcaagaagcggtcacttggccaggtcactttgatcttgccccgtggtgaaatcagacggtccctggctcgtgggcgctggaaccaggggggaatttcagggtgagtcatgaatgctagggggcaggggtgaatgggctgtaatgtcagctttgttttcctgtcaggcgagagagagagagaggaggggaacaagagagaatgatgccaaggaggcgcctgggcagctgatgagctcagccccagggtgactgcggtcatttgggtcggcagtggggacagacatcagccccagctgggtcatgggtcatttacggcctgggtctccccctctcctccctcctccttctctccaacctgctttcttgctgctggaagggggtgtgcaggctcccgtgtgcctggcacagcaggggcagcacaggagactccatggggcctgtgtcccgcacccccacgcccccgcccccagccacagccctttgagagcacagcggaatgaacgcctgattaggaatcagatgccagaaagaagctgtgtctgttccaaaatcaagagaccaggagaagtgacgtcctttaaaaggagagagctaagtgacagagagggggcttgtccccagcccaggcacctcggggctgcaagctcctttgagatgcggggctcaggcctcatcaggggaaacgtgggcatctagatgaccctccacactgagcagacccagcacaggctgcgccactcatcattataggctgcgccactcattataggctgcggggcctgcacagaccccaggcatcgagcctgcgatggggcaacgtgtggtgtggaggccatacccctcctctgctggctggcagcttggcccagcctcctcactggtgaacagtcagctctgccccctgggctgtcaggaggattaaatgagataagacaaacacagagcaactccttgctaacagccatgcagtaccaagcaaggcacagcaaagggaaagagaaatccagtggcaccagtgggctgagaaactgtcgggtttggctgctgctgttgtctgcatctcccgccttcctcctgagccgtgcttccagggcagccccggcccttcatgtcagctggtgacatttctgcaattgttcctaaagaggggcctgtgggtcgagtgagctaagcagggcttggcaaggtggtgtcccccggtcagtgccagagtctccctaatgtggcctgtgagacagagctgatgctgaacaaaggaacagggtgatctgggagcagcagcagccgctgtcctgagcatctgggtcaggacgacacggatgccaccccaggacccctggcatagggagccgagcagggcagccgggcagaggcaggaatgaatcctactcagctgcagaatagtcacagacacctctccaccagcaacgtccctgaaacagtctttcttattaaaaaatattgagtgtcagttatgtgtcaggcactgttctggacacgaggtctcaggaacaaacaaaatatacagaaacttggcccttgtgttgctcaggatgaagaggagaagacaggagctgtgaggtgtccccacctgtccagaggctgggaaaacttaggagacggtgctgcttgtttagaaaaccgggcagaggagccctgctagtccaggccgggccagcgcccaaggatgaggggaagcacagctcctttggggtctgcgtgcatttgagcatgagtgcattaacagggggaacgtctgtgtttacagggcatgcgtttgggagccagacagacctgggctgagtcctgccctacatactaactagcctgctgtgtcgccttgcaaggggtgagatttctctgctctaagtcatgggtgctgaggcccacctgtctggcgagggtctgggggaggtcggatgagatgaaggaggctggggctggcaccgtggtggtccctgggctgtgcctgtttccctcccacttctgctgcctccatctgaccctgctccggagggaccaggggaggggcggacggaggacactgcttctgcagcgctccttgtctccgtcagtgatttataggaagctggctcaaccgagagctgagggaagacggtgaaggcccttttgtttttagttcaattttgtgagcagaatgctcctggggccaatagatttttccagtaatgaaattgtgaaaataattgaattatgcctttccagcttcaaagacaacctgtgccctttccccagccctccgcatggcattagagaacattcgcctcctgctgggtcggccccttcgcctcttccttctgtctgtcggtgcagcctctgaatagaatcctggcgaagggaggggctgggtgtgttgttgctgcacccaggactgcccacatcagttgcaaaatgcaatgtggggccctttgttgaaaaacaatgaagaatttcaagatggtggcagcagagcctgaaaccgagctcagggcccatctgagcaggggcccggtgtgaccacacggatcccataccggtgatgccaaccccctgagtcccggggaacagtggcaaatcagcactcaggaaatatctgttgaatggaaaatccagtttccttcgccgtcttccttgtctgtcctctcctgccgcctccattcaactttctcccttcttctcacagcactcggcagtgtggactctggctgcctgggttcaaatgagctcaccacctcctagttgtaagctcttcgacaagtgacttaaacactctgtgcccagttttccgcatctgcaaaatggggagataaatagcccctacctcctaggatcatcatgagaatgaggtgtgcgaagcttggccggcatgggttccatagcaggcactcaggggtgtcggccacgaagattattctttctcttctctctttgccgtcttatttcatctctctccgttatttggttcccctgtccttagtcccctttctcccccaatggcatcccaagatgcacaatagtggcaagtgcccagcctgtttccacagcctgatccccaccactgcgttggccagtcacccaagaagcagctggacccatcatctggctctagggatgacccagttccagcacccccgcaaacctccgtctgtccccctacctccctcagcagaggcccagcccaatgcaggcccgtggctggatgggagtagctcttcccaccacccctgggcagggctctgcggagcttgggagcctcacctggaatcggccctcatgcctcagtagagaaggagagcgaggagagaggtgatggggctccgcgggcacccccgatgcacagtctccttctgggcttctgatggccacaaggccagaagacctgcccagaagaattcagtataacccagttcagtgaaattggagagaacgagggcctgcgtcttccgggcagaaggcagggttcctgccctctggagcccttggcctggcgcgggctgattaggacctagatctgcctgggtggctgggtggccgagtggcgattgggctggttctgtaccgggtgtgctccgtggggggcgtgatctggcaaagccttggaggtgggactgtggaggcaccattgattgaactgtgtcccctgcaattcacatgttgaggcccaaacccccagtgtggctgcatttggagtagggcagtaattatggttaaatgaggtcgtatgggcgggtgctgatccactaggattaggatccttataagaacctgccaccttctctctgccacgtgaggacatggggaggaggcggctgcctcccacccaggaggagcccttactggacactgggccctggctgcaccttgaccttggacttctagtccccagaactgtgagaagtagatttctgctgattacgctttcctgtctgcggcctgagctaagacagcagcgcttggggagaagcagaatttgaggagctcctcagtggcaggctgccctggccctgctgtcagcagaggggaatggccatccatgctggcccctcaccagccgggccttcagtgagctccccgggtaggtgaagctctcccagctctgtgtcccccgccaaagcaggcccacaagcgagcgcctatggggtggagtgagagtgaggaagaaacattacccgaggggtcactctcttcagaagacctcaatgactgtagactactgaattatttccttaaaaaaaaaaaaaaaaggctaggtatggtggctcaggcctataatcccagcactttgggaggacaaaggaccacctgaagccaggagttccagactagcctgggcaacacagcaagaccccatctctacaaaaaatttaaaacttagccaggcgtggtggcacatgcctgtaatttcaggtatttgggaggcagaggcaggaggatcacctgagcccaggagctagaggctgcagtgagctatgattgcaccactgctttccagcctgggtgacagagtgagactcaaaaatggttaaaaaaaaaaaaagaaaaaatgttgatagctactataaagtttctcttatgcagtacctcctcattttacaggaaatttggagatagggaaaatagaaagaagaggaaaagatgcccaaatatacccagaaagtccctgctaacatgctgctgtcgtccttctattccttaatctaggcatgtgggcttttttcttatttaaaaatgttgatttagatataattacatgcagaaaagtgcacaaatctgaagtctgcagtttgagaagttttagacatgtgcatactctgcaccgaccacctctgctaggatatagagcatggccagtgcccagagggcaccgcaggccctgcctagccacactcacactctcttcagtaacccctcattctgattctattgccatagaatagtttggtctttcttaaacctcatataaacgaaccatgttgtatgtggtctttgtgtctggctgttttttcccctattttaaaaattgtgttaaaatacacataaactttatcatcttgaccatttttaagtgtacagttcaacgttattaaatacattcataatgttgtataaccatcactgccatccgtctgtagaactcttttcatcttggaaaactaaactccatactcattaaacactaactctgtattccctcctccccgcagcccctggtaaacaccatcctaccttctgttcatatgaattaaaaaaaaattttattttagtttttgagacagagtctcgctatgtaccccaggcgggagtgcagtggcgcaatctcggcttacggcaacctccgcctccccggttcaagtgattctccccatcagccctctgagtagctgggattacaggcacacaccaccacgctcagctaattttttttttttgatattttttaatagagacagggtttcaccatgttgaccaggctggtctcaaacacctgacctcaagtgatccacctgcctcagcctcccaaagtgctgggattacaggcatgagccattgtgcctggctgtgtttcctatgaatttgaccattctaggtacctcctatgggtggattcatacagtacttgcctttttgtgtctagcttatttcacttagcataatgtcttcagagttcatccatatctgtagcatgtctgaatttctttccttttcttaggctgaataatatttcattatggatatcatggcatgttgctcatccattaatcaatcagtggacactgggtagcatctgcccaagttttagacattgggaataatgctgctgtgaacatgtgtgcacaaaataactcttcaagaccctgttttcagtttttttgggcatatacccagaagtggaattcctgatcatatggtaattctacttctaattttttttctttttttagatggagttttgctcttgttgcccaggctggagtgcaatggcgcaatcttgactcactgcaacctccgcctcccgggttcaagtgattctcctgcctcagcctcccaagtcgctgggattacagacatacgccaccatgcccggctaattttgtatttttagtagagacggggtttctccatgttggtcaggctggtctcgaactcccaacctcaggtgatctgcccgcctcggcctcccaaagtgctgggattacaggcgtgagccatcgtctacttctaattttttaaaggaaccaccacactgttttccacagtggctgcatcattttacattttgtatctggtttcttttgcttaatattggtcagggagattcatcaatgtgtacagcacaagtttgtttctttataattgctgtgttaaggattccattgtatgaacaaaacacaatctattaattcccctattgatggacatttggattgttgcccactgtggctattatgaataatgctgtcattaaccgtcttgtacacattttctggtggtcataggcacctgtttctcctgtgggtatatttgggaatggaattgctgggtcatagggtaggcaattgtttcactttagtagatattaggtgtaaattttgatgtctttaaaatagtactgattgagccgggtacagtggctcatgccggtaatcccagcattttgggaggccgaggcgggtggatcacctgaggtcaggagtttgagaccagcctgaccaacacagtgaaaccccatctttactaaaaatacaaaaattagctgggcgtgatggtgggcatctgtaatcccagctactctggaggttgaggtaggagaatcgcttgaacccgggagttgaaggttgcggtgaaccaagatcgcaccattgcactccagcctgggcgacagagcgagatttcgcttcaataaaataaaataaaataatagaataaaatagaataaaaaaaaatatggtactgatcatcacataaagttttgaggtctgcctttttcacttaacattaaatcattactatttttaagttagaacttttattttgagataatgatagattcccatgtagttgtatggagtaacacagagagattcagtgcaccttgtacccttttctcctgtggtaacatcttgtgaacctaaaggcaatatcataataactatattgatgttgattcaatgtcctcagatctccctagcttcctttgcatccattcgtgtgtgtgtgttcctctagttctacacacttttatcacctgcacatatttgtgggtccaccaccacagttccaatgctacaaggatccctcctgtttgcttctttccttttccttccttccttccttccttccttccttccttccttccttcctctctccctccctccctccctctctctctctttctttctttctagctgagattacaggcatgcgccatcacgtctgtttaatttttgtatttttactggagatgaggcttcactatgttgaccaggctggtctcgaacttctgacttaaggtgatccacccgcctcagcctcacaaagtgctgggattacaggcatgagccactgcgctcaagctttttttttttttttctttagacggagtctcgctctgtcacccaggctggagtgcagtggcgcgatctcggctcactgcaagctccgcctcccaggttcacgccattctcctgcctcagcctcctgagcagctgggactacaggtgcccaccaacacgcccggctaattttttttttcgtattcgtagtagagacggggtttcaccgtgttagccaggatggtctcaatctcctgacctcgtgatctgcctgcctcggcctcccaaagtcctgggattacaggcgtgagccaccgtgcaggctttttttttttttttttaatgtgaagtctcactgtgttgcccagactggagtgcaatggcaccatctcagctcactgcaacctccacctcctgggttcaagcaattctcccgcctcagcctcccaagtagctgggactacaggcacctgccaccatgcctggctaatttttgtatttttagtagagacagagtttcaccatgtcgaccagactggtctcgaactcctgacctcaggtaatccacctgtctcggcctcccaaagtgctggaattacaggcatgagccactgtgcctggccacccctcctgtttgtttctaacacaatcatctacccccagcctctggcaaccaccaatctgttctccatctttatacctttgtcaccataagaatggtctgtacatggaatcaagcaactagtaaccttttgggattggctttttgcagtcggcatagttctctggagagtcatccaggttgctgtgtgctgtgatttgaatgttggtgccctcctaaattcatatgttggaatctcacacccaatataatagttttaagaggtgggacctttgggaagtgattaagtcacgagggctgtgacctcatgagtaggattaatgcccttataagagaggtgaagggagtgccactgcccctttaaccacgtgaggacacagcaacaaactgccgtctatgaatcagagagccctcaacagacaccgattctgctggcaccttgatcttggacttcccagcctccagagctgtgagcaataagtttctgctctttataaattatgcagtctagggtattttgttatagcagctggaacagactaagacactgtgtaccgatgatttattcttttcgttactgagtggtgtttctggatttggacataccgcagtatgtctggcattcatcctttttttgtttgtttgttttgagacagagtctcactctgtcaccaaggctgcagtgtagtggcgcgatctcagctcaccgcaacctccacctcctgggttcagctattctcatgcctcagcctcccaagtagctgggattacagccacatgccaccacgcccggctaatttttgtatttttagtagagacagggtttcaccacgttggccaggctggtctcaaactcccgacctagggcatccacccgcctcggcctcccaaagtgctgggattacagatgtgagccaccacacctggcctgacattcacccttaaaaggacatttgagtgctaccagtatttgcctgctttagtaaagctgctatggagactagtgtatagattcttttgtgaacttacattcacacaaaaatgcagttgctgggttgtgtggtatttgcctcataacttcagatgcttcttgactcacaacatggttacttcccgacgaacccattgtaaattggcagcgtggctgagtgggagctgcatctctctgcctctgtccagcactgtgagggaagtacagtttctattgaatgtgtatcactttcacaccatcataaagtcaaaaaatcctgagttgaaccatcataagccagggattgtcagtatttttagaggagctcagggtcataggttactctgccagttacatattctgatgcaaacgttttctgaagcctttattattatgacattctggggacctccataccccttatttttggggattagagcttccctctgtctaatccagctctagagccacctcctcgggaagccctccacccagagccacctctctgtgagagcggccccaccaatgactttcctgtgggatgatggagccctcatgctgagcagaggttaatgccatcccacggctcccttcccccagaggaggtctgggtctcagctgaggcttacagcctaacacatctggctccggacatactgggagctctttacctgagggtgtccctgtcatgtagacagaggcttttgagaaaataaacagtcctgagagaacctcttcgtcctgggggaagctggcttggtctggtgaagacttgttcacttgcttccagcagaaaataacttcgctgtgagcctggaggttattataactaaatcattctgtgaactacacagacaggctgggcatggccattgtatttccgtcaccctggagagaaatctgtgaccaaatggttaaaaaaaattccaagtcattcattattcaccctcgctgcataatgcatgaaggctgcgggccaggcccatttatgttttcaacattggcatcaaatgtcagccactgcctcagagaggcccacgagggccttggcactcgtggttggccccttctcccctctggatgaacctcaggcctccagggctcctgcctcctgctcactaggctctcagcctggatggtccttctttctcttcttctatgaagccctctccatcctttagggcttagaaatcatctcctccctgtcacctgccagggcaggaagtcatcctccctctctgttccccctgtaacactttatttttatttatttatttatttatttttttgagatgagacggagtctcactctgtcgctaggctggagtgcagtggcatgattatggctcactgcaacctctgcctcccaggttcaagcgattcttgtgcctctgcctcccgagtagttaggactgcaggcacgcaccaccatgtctggctgatttttgtatttttagtagagatggggtttcaacatgttggccaggctggtcttgaacttctgacctcaggtcatctacctgcctcagcctcccaaagtgctgggattacaggtgtgagccaccgcacccagccccctgtggcactttagagtattgataaccaccaccactgtgatcataactagtatgatttatatagtttgtattctctgctggacacttaactcacactatctcatttaattctcataatagccagtgaggcagatattctatttctcaattttaagatgaggaaacaggcttagagtggttaattaatttgcccaaagacatgcagctagcaagaggcagcatattgcaatttgcctgcaggatggtagcaattgtcatcccttttcttctcaatcattctcaccagaaatgtattagtttttgcagccttttcaaggaaccaactttaggtttcgttgattgtctctgtttcttagttcattacatgtgtatttttatttctagtcctgcttgcttaggatttattttgctgttccttttgtaatttcttgagatagatcttagtgcatttgtttttaatcattcctcctttctccagttcaggctggtcttgaactcctgggctcaggcaagcatttcaggctagaaatttccctctgagtactgctttggttgcatccctgcacatacaagttttgattgtaggagtttattattccattgaaaatattttccgattttcctggtgatgtccaggtgggattgtgctcaatctgacagactgcacagctctctctctctctctctttttttttttttttttttttttttttaagacagggtctcagctctgtcactcaggctggagtgcagtgttgcgatcatggctcactgcagccttgacctccagggctcaagggatcctctcacctcagcctcccgagtagctgggactacaggagtgagccaccacatgcagctaatttaaaaaaaaaattgtagagataaagtctcactatgttgcccaggctggtcttgaactcgtaggttcaagcaatcctcattcctcagcctcccaaagtgctgggattataggtgtgagccactgtgcctggctctttttatgatactcttttctgacattgagcaaatcattttcatgtctgtccctcccccaggatcagtttgagaccagcctggccgacatggtgaaacactgtctctactaaaaatacagagactggctgggtgtggtggtacatgtctgtaatcccagctacttgggaggctgaggcaggagaattgcttaaacccgggaggcggaggttgcagtgagctgagatagttccactgcactccagcctagcagcctggacgacagaggaagactctgtctcaaaacaaacaaacaaacaaacaaaaaaaaacccaaaaaaaatcccacaaaaaacaaaactatgaactaggtggtctagaaacaattatttctcacaggtcgttttaagccactgagtttgtggtaatttgtcacagcagccctaaaaaataaatatacacagttttaattgaagttgggctaagaagctggacgctagtcccagctactcaggaagtggaggtgaggggatcgcttcagcccaaggagttcgaggctagcctgagcaacatagcaaggcctcatctctaaaaaataaaaattaaaaattgggttaagaatttagcagctagtccttaataggatgagccatgaggaccggcagctacatatcagtggtttgaagcaaatggttgccaagtcgctcctctccctcccaggtcatcaccgtgacatccttttgtccagtgtccttccctccagggtagctcaggttaggggaaacagccaacacatccatgcaaggaaataaatggccactcaaacgcagactcttttaaaagtgggagagtggctgggtgtaatggttcatacctgtgatcccaacactttgagaggccgaggtgggaggactgcttgagcccaggagttggagaccagtctgagcaacattaggaagaccctgtctctacaaaaattacaaaaatgagccaggtatggtggcgcgtacccagctacttgggaggctaaggcgggaggatggcttgagccctggaattcgagactgcagcgaactatgatggcaccactgcactccagcctgggccacagagcaagactctgtctctaaaacaaaacaaaataaatagaaggaggagaggcgtgagcattgagagcatggccaaagagcggcagcactggctacccagcacttactagccacatctgggcctaaggattttatgtccctcaggactcacggggctgatgtgccatctgacccctctgagacctgtgggactgggctccgagcctctgggacactggaggggtggaggcaggtgtctgggcaacatccaataagaagcctgtgacagagtcaacagtggcaagagccctttgggccagcccggctcatcccctcctggctgcctgcccctccatggcaaggtcattttccttgattccgatcacagcagacctctgttgctctgtggctgattcattcagagaagcagggttctggctgggtatggtggcttatgcctgtaatcccagcattttgggaggccaaggtgggcagatcacttgaggtcaggagctcgagaccagcctggccaaaatggcaaatccctgtctctactaaaaataaaaaaattagctgggcatgatggcacgtccctggaggctgcagtgagctgagattgcgccaccgcactccagcctgggtgacggagtgagactctgtttcaaaaaaaaaaaaaggccaggtgcggtggctcacgcctgtaatcccagcactttgggaggccgaggcgggcggatcatgacgtcaggagatcgagaccatcctgcccaacatggtgaaaccctgtctctactaaaaatacaaaaacaaaatcagccaggcgtgatggcaggcgcctgtagtcccagctactggggaggctgaggcaggagaatggcgtgaacccaggaggtggagcttacagtgagccaagatcgcaccactgcactacagcctgggtgacagagcgagactccatctaaaaaaaaaaaaaaaaaaaaaaaaaaaaagcaaaaaagcagggcagcagggttcctagccccggctccactgccttttctggcttggggagacaaagcttggtaacatcaggactgcaaacatcctgccattagatcttggaccagcaccggcctggtagtttgctgtttcatcagggggcttgcagttcataagcaatcccttcttttcttttctcccaaagctgggaaatcaaaacaaaacttccttcccttccgatattcctctttactaaaaatttgcgtagccaactctcctgggagtggggggaccaacttggctcaggttggctgggatggtcctgtttttagcattgaaaaccacaaaagcaatgaaagtctcacgttgtgggaggccctgagtcctgggcaaactgggactgttggtccaaaccgtcccttccagaagaggcccacatggcaggccctttgaggcctggggcaggcgggacagaggcagcacccgcctggcatggggctgaggcctccttgcagctgcctcccggccccttgttctccttcatggctccatgcacagctgaggggagacatgaggtctctcggtctccatgggtttggggcaggcccagaatggccctgaatccagtaacaccaactgtccctggaagtgtcaccaccctggtctgggaggagctccatgaacatctcaaccatccacttcttgtgcagatggggaaactgagtcagaaagggaggagactgccttaagaaagattcttgcaacttgactttgatcctgtagagtgtttgtgggtttagaagagcacaggtctgaagatggaagacttgggtttcagacccgtctctgccctgtgcaccagcatgcccagagcagcactaacccaaagccaatctgacaaatgaacaagtcattctatttactggtttctttgatctatttataaaaatgaatatttatagcaaatcctgtaggatgcggtagatttggaagatttctgtgatgttttgtttgactaatgcttattttcccttttgtatcagtattttaacaaatgctttggatttcctccacgcagaggagaatcagtatgcagctgttaattttggctgctgactccaggacaagagacagagagagagcgtgaaagcgagacagagcgtgagagtgagagagagagagagaggcaggagaggctgagcgtgggagggagacagacggcatcgattcattaatatattcaaaactatattcaaaaactattcatttaaaaattctggaatatattgactacatactttaaaagacttttttataatgggaaactttgaacataggcaaaaatagaataatagaaaagcccagcgtgcgacatcagtgtcaacagaggtccatatgtggccagtcttgtctcagccttttccccacccattcactcctctcccaaatccggatggttttaaggtgattttagccatcgaattccatatgactctgttctcaagtgtactggatacattcttgaaaatactcttgaacatattcttgaggatgagaaattcttacaaatgtatattttttgtgcccctgtgtctccccttccttgcctttcaaactcctctctctgtccctttgtctcctttcccccacccttcacctcccctctctgttctccccagtctcccctaaactccaaatctctactctgaccctcagtctcatcttctgggtgaccgaagatggggcagtgcagcccctgctgagctgaccctcctttctgtccttcctcgtgccgaggttctctctccttgactgtttctcctagctgaagcagtaggctgctggacagaggcaggtccagcatactttgaatgttgttatgaagtccagtggagaagagctagcctaaattcggcagaaatcttcaatatctttaaaaaagaaatccctccattatggatcactgtaaacttgtatcagttgttataatcaatgaacacattgactgaattggccttttgatatattgacttagagctgtgtgattttggatgagccattttaccttttagagccccagtttccatctctgtgaagtggggaagtgtggaccatagcagtggttttcttttttctgaggcaattctcctgcctcagcatcccgagtagctgggattacaggcgcgcaccgccatgcccagctaattttttttttttttgtatttttagtagagacggagtttcaccgtgttggccaggatggtctcgatttcctgacctcgtgatccacccacctcggcctcccaaagtgctgggattacaggcgtgagccaccgtgcccggccagcagtggttttcaaactggtttcggaagcagattcattcttttcctagccaaagcctggtgaaccgtagtgtgtacaacagttaaaagcagagacctgcaggtccacaggagcagacgctgagaccagcctgcctggggtcaatgccctctaacccctctgtgcctctgctgttcatctgctgaatgggtctcatagttgagcagtggtcgagagatttcctggcatcaaatacatggaagggacttagcgtaggtcctgcttagcacatagtaagtgctcagcgaacttacttaccacttattacttaccacccctgcctgaagcagggtggggccaagggattggctggacctcagccactacccctcccctcacatggagccaggccccacctccacagattgggggcttggggacacgtcttctgtgctccatgctctcaggtcccagtgaggctgagcgctgaaccatccaagttggcagggccaggacaaggacccaggagctctggtgcccaggagtcccccgaaggggggctcagaggaggtgcgtgcggggctggtgccggtgcccccgaggcccacgtgcagccccgctctgtggggcctttgcccagcctcctggtccttgccagcgctgcatggcgtttcctgccggagtgctggtcactgagggctctcagacaaggaatgacccaggggctgggcccagcctctcccttgttccctgatgctgctggggccgctcctctctacccagcagaagggtcccgcaggaagatcagctctgaggttaattgtccttctggatagctgcagcccagttgtcatggaaaccggtcacgcagggctcggtagcaggaccctccttcctacctctgccacggtgccgcaggctcagagggggcgtgggagctgcatcaggtgatggtaagatactacagccattctccaactgcaggcacctggaaggagaaggtggcccggggccaactgtgcagtgagagaggctttttctgcgtctccccgcagctgtcttgttttcagcagtggccctgggggagatgtggacgctctgaggcctggggctggctctgtgtgtccaggtctgtgtgggggtcactgagagaagggaaaggcaggggatctggccccatgtggatcttggtggccctggcacttttttactctgagcccagccttccttgtgtgtaaaacagggattgtggtgcctacctcttgggcttgccctgcagatgggccgggctgagccacaccacagcggctgggcaggttcaggccccttctcacctctgctgtcctccagcaccatgattcggttgggaacagaggaaggcgaggagagccatccgcttcctgcttctgcagcattcggccatttgcccaatgctccctgatgccacggttctcaaagtgtggtccctgtccctggcctgggagcatcagcttcctgtggggactctagaaatgcaagttctccggccccacactagactgactgaatcagaaactcggggcggtggggtctagcgatctgtgcgttaacacatactctagggggttccgatgcccctcgagtttgagaccctctggtctaatgatttatgggtgagacactctgcgcctgcttccctgaggaccccgagctgcagccccagggcttccccctcccactttgggtgagtatgagcagggcccaggtggctggggtgcagtgggcagcccggtggtcctgcctggggtctggtgctccctcggtgtctgtcagctcgggctgctctagcagaaggccacagaatgggggctcacaccgcaggaatatatagtctcatggttctggtgtctggaagtctaaaatgaaggcgttggtagactcagtttctagtggggcctctcttcctggccagcaggtggccgccttcttgctgtgtcctcacatggactttctctgtccatgcatccctggagtctcgccctcatctggtggtcctttgtaaggacaccagtcctactggattagggtcccacccttaggacctcatttcacatgaatcacctccttaaagacctcatctccaaatacgtcctgttgaggagttgggcttcagcatatggatttggggggacactcagtttccttgggcctctcagctcctgagggggtcatcatgagccaccttcctgcttgagggggataaagggcagctgggacccagggcctggggccttgggccgaggcatggggggcatttgtgggccggtgtttgaaatgctccaccagcactgcaaacacaccagacccctgaagagagggtcaggcgctcagctaggaagagggcgctgcggagagagtggtgtgtgtcttcctgtgtcctcctaggagcttctgtctgagaagtcagaagtcatgagttcccagtcctggccgcatttggaggctggatcattggagggaggcgccggcgccccatgtagctgatgttggtggagcattggctgagggcccagagagccatgctgctgcctcccacacatcaatcactcaggccacacagtcactggtgaaagagggcacacaggtaatcctccagttcttgaatggggaatggaggcacaggagggctaagcgagggcccatggcctcaagattcaaacacaggcactgtctggccccagaacacacgcccttcccacctggccgaggaggtgctcacaaggggcactccaggtggatgcagagtgggccagccccctcccttcctgcgggcagtggcccctgctcttcaggggagtcagatgcattgattctggaggctgaagccaggtggaagtgatctagaggggagatgaatgtgaggcgctgccccggaggagacaggaatggctcatcagccacgagccagtgccatttagaaactggcagccaaagtgacgaggccacacagggcaggaggagcaagagcacacgcttggaggtgatggtattccagcagtggcatcagctcagcctgggccaggccaatgagcccaccagcagcctgccccttgctggggtggaagcctgaaagcagaccacagtggctgctttctttggtctgggggagctcaggccaggggctggttagagtccccagcacagccccatcctccatcccacagtgggcagcagtgtgaaactgggcaggggacttcaactctcctagtctagttttttcattcatgtcaagggaacaccactactgacctcacagggtgagggttaagtcagatgatgtgcttaaaagtcttacatgaggcatggtgacactagatgggccagggcttcctgaaggcagggtcaactctgattcatcttgacatctccagttcctggcccagagcctggcacatagtgggcacttgagaagtgtctgttcccttccctcgagagggtcttcaagtggtgaatggagatgatggtgatagtgataatggtggtgatggtggtagtgatggtgatgatggtggtgatggtactgatgatggtggagatgatggtgatgatggtggtgatggtggtgatggtggtattggtggtgatggtggtggtgatggttatgatggtggtggtgatggtactgatgatggtggagatgatagtgatggtgatgatgatggtgatggtggtgatggtggtattggtggtgatggtggtggtgatggttatgatggtggtggtggtggtactgatgatggtggagatgatagtgatggtgatgatggtggtgatggtggtggtggtggtgatggtggtggtggtggtggaggtgatggtggggttggtggtgatgagtgtgatgatgtgatggtggtggtgatgatggtggtgaggatggtgttggtggtgatgagtgtgatgatgtggtgatggtgatggtggtggtgatggtggtgatgggggggttggtggtgatgagtgtgatgatgatgatgtgatgatggtggtgatggtgatggtggtggcgatggtggggttggtggtgataagtgtgataataatgacggtggtaatgatggtgttgatggtggtggtgaggatggtggtggtgatgatggtgatgatcatggtgatggtggtgatgttggcgatgatggtggtaatgatggtggcaatggtggtggtgatggtggggttggtggtgatgagtgtgatgataatggtggtgatgatggtgatggcagagatggttacaatgctgagagtgatgatcttggcggtgatggtggtgatgttggcgatgatggtggtaatgatggtggcaatggtggtggtgatggtggggttggtggtgatgagtgtgatgataatggtggtgatgatggtgatggcagagatggttacaatgctgagagtgatgatggtgatggtgacgatggtgatataagtccccatgcgcacttcctcttctctagctctgtctctcacctgctcttgcctgagctccactgtggccacccacctgtgacctgtggatggaaagtaattctaattatgacattttcctacaaagaacaaaccactgggcttctctggagcacaaaggcatggcgagatgagcagtttgccccacaggacgctggcattgccctctgaactttttcccagatgtgctgaggacaaggaagtcaggagtgtggcttgttttccatctgctcaacactgctcgtgcctggagccccccagctgtgcctatcagcccctaggggttggctgtcaggggagcagagagactcttggggcagcgtggccttggtcacagcagaatgctgggttctgacatttatgagccatgtgaccttggcatgctccttgacctctctaaaccttgcatgacacttaggaaggttaataagatcacgtctgtgagaggtcttagtgccacagtagatcagtgtcagtgagggtagggacttagctctgtggcttgggaggcgcaggtggcagtgagtagccagtgggtgagacccagagaggctgtgcctgtgagcggctgggcagagtgggaatgggtgctgtcagctgggtgcacaggcagaggaggtaccgctgcccacaaagggaagtctctgagttggagcggagcaggggcgggagagaaggcaattggggccttcctgggtttgggaggctcagcaccaggagcagcccacagccagggctcaggacccaggggctcacccagccctcctgaccaggctaacctgcggggtctggagggaacacgggcagccacggccatgcgcactgggaataagtgagaggctcccgctatctcagacctggcgtgggagctgtgggcctttccagggcccggctgctgcggaggtaggagtttggtgttggcagcaggagcagcaaggacacactttaggacctacagcgtggaggcaggaggacagggaaatggcctcgaatgagtccgtgaccccttgaggaatctgcacacgactcctggctgtcttgtcacttgatgtaaggcctcaagcggcatctcctgaggatttcatggaggccagaggggactcacccagaggtggagggatgcaagctcagaggccagggtgggcgggggctggagctgctctgtgacagcccagagctcccggagccgcagccaccgtcccaagagagctcaaaagaggagggggtgggaagggggaggtaaaagctgttcagccaaggctttctcagcctggggactgacctgggtttgtcctattctgtgaaccaacccaaacatgtaaatgtcctggcactgagcaaagccttccccaggggcgttttccctgaaggacttctcagagcctttaatgggccagggaatcttgtcacgctcaggtgatggtagaggaggaaaggacttctccaaccgtggtgactctagaacctctccctacagcagctcggggagctccagctctggagaacacactttgggaagccttcccacgcaggacagaggtctctctgccgggctgcgagccctgcccacttgtgaccagggttttcaatcccctggtgtgagagcagtctcaggtagcccaagcctaagtggaaaaggggccgggagaggcggctgggcaccccctcgctggggctggtctcctgggtccctgtttcctgtctcaggaactgggaggaacccacttccaccacccagcaggggaagactgaaagtattagggggcctgtctggggtcagtcccactgtggacttgggcactgccactccacccccccctgctgccacaggcagtacccaaaggtggtgcattcggaccctgaacccccagcttcatgggttctaggaccctcctctccatggctcagcttccaactgatgacccctctccagagccagcctctgtcctccagcaggaggtagctttggcctctcttggtctctgacccgcatgtcccttctgcgctgcagtctcctgggctcagggtcctccttcagactcctccagggaggccacaccctcacacagacctgccctgggctcccttctctgctctgagcagcccctagtcttacaggagctctgcagaggcccttccgctgcagaagagcttaggtgacaagccagaagcctcaggtggcctccttgttttgccagccctcccccgtcggttccttgctttttctacccagcttggatctcggggggctggcctggatggattttgtcaatgactcacttgccctttaatgatcattgcatttgggaagccctggccagagatgcaagtgtagcaggagaggttggaatgttcctgtgcctcctcccggagctgctgctgtggggcagggagacttctcccttctggtggcctcctctcctccagcccctccttctcacgaggctctgtgagactgttttgggcctggaggcggcaacagctttccacggggctgggtgccgggtgcctcagtgtcccccactgtccctccattctgcccactcctctgcaaacagcctctgcatcacgtgttcttcaagatgccagccgagcgcgcctgcaggagcctgtcctgctcaggggcggagggctctgctcgtgtgggcacagctctgaggcggtccttgtagcaaacatcgctgactgcctaccacacgcccggggacctcctgggcacctgtcagtcatgaacgtaacaggttcaggttacccaagtcccatgccctaactgggcagttgcaccatgggcagcaacagaccctgggcttcaggatgtcccagcagagccgcagcagccacagagcaacccctcttcaccctggggatggggctgggcctctgagagcaagcatgagattgcagagccaaaacccaagctgtcaaaacgaccagcaagaaagacagtttggattaattggcacagggaggtccctagacatttagattatggctgctcctgggctggagcgtggaacccagagacatttcacaaattaacataaatcctgtgaaccctctgtccatttcaacgcttaatgccaaacataaacaaatgaaagtcatttcagaagctggaggagtttgaataattcagtcccatcatcatttactccaaaacgcctcatttcatcttatgagtcatcgttgaaaggaaaagaagattttacttggtattagaaccgggagagctggaaaagcttcgaagaggaaggaggctgccagcttcctgggtgcacaaggccgtggccagcttccgggctcagtcgtggacaaaggcctcctgggacagagaagtggcctctaagcaaaggcggtggtgtgacgctagcaggcctgtgtccacctcctggtcaggctgctgactggcggggctctgggggtaaggccttggtcctgccgtgcctcctcctggctcatctgtgacacagaaatgacagttcctactccccagcttgtgcgggcccaaatgggatggggtgtgtgtgtgaggactggggcctaggcctgtgcagggcaggttgtgttactaacgtccccccgtggctcctgggctaacggtgcacttctccgtcctgcttcactgccttatggcacgtgtccatttccccaaccaccggtgggccccgggtggcttggccggcctggtgtcccgtgcccagcatgggctctggcccaagttagcacttgctgcctaagtgcctctgccttttactcacctccatctggagcgggctcagtggggttcctgctggggctctacgggggcatccagactttgccctctgaccagccccactgtcctgtccttccctcccctgcgtcctcatctgtcactccttggtcacagccgccccctgactttcctccctgcctccttggcatggtgggaaacatgcgagttccatttctgaggctgccttgtgcctgatcttgggcaagttgcttgctagacctctcggcgtctccgttctcagcggtgcgggtaacctggccctgtgctactgtgtgtgggtttacagccaaggcctgtgaggcacgtgaccaccaaaaccctcacgaggccatgtggtcgtggctacgggtttaatctaaaattcattctgatcccttggccttggaaaaggcacttagcagggtggtgagggccacaggtgtggtctgagctcctggggagctaccgagggcaacaggcatgttctggaagacccaccgtctgaggggtcatgtgacaggtgggctaggtgggcacagaatgggaagagaggcagtgaggcagcctctctgcagaggaggggcttcacagaggaggcagcggctcaggtggtcccaggaggatgggtggggttcggaggcagagggctggacttggaaggaaggaagagcggacacagggcctctgagcggacagtgctggcggagccctggggagcaccgagtccccgccgtgatgggtccctgaagcaccggagccagcagcaggagcatgcgggggagaccttggcccagccctgcagtcaggcagtaggtgagccctgaagggtgaggttgcttcagctggatgagagggtgtgggagagaggagcatcccaggcaaagtgagccgcgtttacctggagaccaagggtgggaagcgagggagaagaggtcgcggtgagcctcgggtggacccatgtggcagacctgtgagttggtccccgacagcctcctgcctttctccctgactgcccagcagcagtgttcttgggcctcagggacgtgtcgtgactggctgaaggctgtcacggtggtcctgtgtaggactggttgccacaggtaagtagtgacctggcctggccgatgctgtgttaggataaacgtgctaaggaggctctggaaaagaattttcctgcttggacaagacagagactcacacgaggaaattccttttgttcctaccctcacttccagtgttgaacacagtcatgctagaaatggtgcctggtgcagctgcagccgtcttgctaccagcagggcaaggcagagccggccgcccagggacctgccactgtggggtggccgaagcagccctggcaccacacagctgttatatgctgtggtcagaagtccttattaggtgagcaattaatcagatgtgtggcttctcaccctgtatttcctctggcaagaccctgcggcactgcagacccctgtcctcatatgaggcctaagcagtgaggagcttcagacccgtgtgaagacagaaggcgcggggagcaaaggtggccagagaggggtggggtgggccacgagcccccaccaactgcaggcccacggctcagcagcaatctgaggtctcccaggcagccttcttgccttccttccatggctccttggaaagagctgggtttcatctcgggacacagtggcattagggatcggcagagaccagcaggagccctgggtccagactgtggctgtttctgtggtgaccagcagccggcactgcctggcagtgcctgggagtggacgttgaggacactgtgcccaggaggtcagtctgcccacccaggctgtgtcctggttgctgggtgggggtgtgaagagtccaggaccagccgttgtcccacccagcaaaaccctctgtgtgtggatcccatggggggccgggctccggggatggacagccagcagccctggcctgagcagccatccggaggagggagcagacaagaaacaggcagtgaccgcacagggcgatggggctgggcagggaggaggcgggttcgctgtggccagatgccaagccagagccgggaggccagagggagggccgcagccgggacaggagtgactgatgccagggcctcagagtgaagacagggctggggtcccctgccccctgatgggaaggagactgcgtggctggggtccctgggagcgcatcccttttgagaccacactcctcagcagcacctccctctctcaagcaccaacactggccttttggctgcctgagaaggggctctggggtccaggggagccagctcagctcaccccagtgagcttcccacactcagacaaggccctactccagggcagcttggcccgtgcctctgcccctacccctgccatggcgtctctccaggccctaggtctgtactcacataacccagtcctgcattgtgctgactcagcctctgagcctcaacaatccctccttcgagtggggacaacatccctgcctccgagggctggtgtgcggatcgagggaagtcacaggtagtcacagctctgtgaagggtaacgcgagcgcctaggctgggaggctgggtctgcagctgccggctccacgggctgtctccacctctccctgcctggctctcctggctcttcgtttcgtcatgttccttctgcccaaccagtcctagggggacagggagactcctgggcacaggggctgctcaaactgccctgggacagatggcctcctgccctgccccaggcagcactgggaagcagaagggctgggggaactccagcaaggcctggggggcattgagcaaagcctggagagagcacacttgtggatgggtgcacctgtgggtggccatacctgcggggcgggcacacctgcaggctaggagtaggggggctgggcggtgggcccaggggagggtgttactgagttacgtggcccccagtgctcctggtcctttcaacctttaagttgaagataaagtcacttttgcaatactaaagaccaacagattctaatattcactcccatgcaggaactaagtgcctgttacctgctgtcctgcttgtcccatcttagggtttcccagggcccagcagagcctttgccataccttctctaaggcccaggctctgggaggaaggtcactcagactttcagcactgctgctggtggatggggcccctctcagaggccctggatcctgctgggcctgtctgcctgtctgaccatggaaacctccaatggggcagggtccaggtttccctccctacaagcacgctcctaagcacgtccgctctgtcgttgtaggtgtagaactcaacaatcacaccctgcaaaggcggaggaaaccctcttccctccccaggcccattctgtgtctcaggccctgcctctcccctgtatgtaccgcatacatccctttcggggctatgcacaggcttcaggggagccccacccatggggtgcatcttcagcaggacaatcatcagagaatgttgtggtccaggatagggcagtcctccacttctggtcctccagaagtggactaactaacatctcctccaaagtcattcttcttccatgtttacggtgacctctgtgttctaatcctgggagaagccctaagctgagctcacgggagctgggagaccctgctgccaagctgagtctcaccatctttggcccattttttttttttttttagacagggtctcgtgctgttgcccagcctggagtgcagtggtgcgctcttggctcactgcagcctcaccttctctggctcaagcaatcctccagcttcagctttccaagtagctgaggatacagacgtgcatcactatgcctggctaattttttgtatttttttttgtagagatggggttttgcatgttggccaggctggtcttgaactcctgagtgtaagagttgaagaaagaagaaagaaacacgaaaagtggctcaacagtccaagacaggtttattttggagaataaacctgagaggggcttctggccgattgctgtcaggagcactctctcttacagactaagggtatttaagggtttagggagggagagcttatcgcaggttgggaatgtttctggtcagaggagtgtttgatttcggggtaggaatgtttctggttggagggcgctttatctcagggttggaatgtttctgattggaggtgtcatttgtggtttatggtcatgctgacagccattaggctgattttttgggggctggatttaggcggtttttaatcaaggggaacttaaaatgctgctgtttgtccaaaatgttgatgctcctgctttgtcaatccagaccctatagttataaaaggatgaggggcgacgtgctctttctggctacttcctgctgagagagggttgtcgttatgggacactgaacatggtgctggagtggaagaggtcgatttgttctgggtagcacactctgcctcagaggcccagaggcagcgcccactgaaacatctaattttcagctcacagggcttcaagaaagcacagcttaggttttagtgatctccagctagaaaaaaaaaaggggggggggaaggaaaagaaaaaggaaaaattgaaaacattattttggagacttgtagccagaaaaattagaatttaatccaaactgtagaaaacaataaaaattgaaaaacctcagacaagactagaatttaacaacaggtgtgctacagtttttgaaacacaattctctctctccagttttccatttatattaaaagacaaatcatggggccaggtgtggtggctcacacctgtaatcccagcactttgggaggccgaggtgggcggatcacaaggtcaggagatcaagaccatcctggctaacacagtgaaaccccgtctctactaaaaatacaaaaattagctgggtgtggtggcgggcgcctgaagtcccagctactcgggaggctgaggcgggagaatggcgtgaacccagaaggtggagcttgcagtgaactgagatcgtgccactgcactccagtctgggtgacagagtgagactcagtctcaaaaaaaaaaaaaaaaaaaaaaaaaaaaaacaaatcatggtatgactagtttgctttgccagatttttttttaggtaaagtttcactcttgttgcccaggctggagtgcaatggtgcaatctcagctcactgcaacctccacctcctgagttcaagcgattctccagccttacttcctgagtagctgggattacaggcatgtgccaccatgcccagctaatttttgtatttttagtggagatggggtctcaccatgttggccaggctgatctccaactcctgacctcaggtgatccacccatgtcagcctcccaaagtgctgggattacagaagtgaaccaccgcacccagctgtggccagattatttgtataaggtgcagcaagaataattatttttacataggccttttaagttggcttcaaaaaaactctgtttcatggaaggaatttgagataagacctttttaaagccaatcccagccatggaagtgcaccatcaaatacctgtgagttgggtgaattcttccactcttgaggctccaagataacctggggttcctggcctgtgagaaagtgacattcctttacttacctcaggtcagaaacctgcacagggactgcgcgcacaaaatatgaggcccacagggaccgcgcgcgcaaaatatgaggcccacagggaccgcgcgcgcaaaatatgaggcccacaggcaccgcgcacacaaaatatgaggcccacagggactgcgcgcacaaattatgagtcccacagggaccgcgcgcgcaaaatatgaggcccacagggaccgcgcgcgcaaaatatgaggcccacagggaccgcgcgcgcaaaatatgaggcccacaggcaccgcgcacacaaaatatgaggcccacagggactgcgcgcacaaattatgagtcccacggggaccgcgcacacaaaatatgaggcccgccatctaagggctctactggcttcacaagtcaagtttgattccttaaaggagagcacaccattccagtcaaagccttgctaaaacaaccagttcttccaattgtgtcctgccataaaagaaaacagacttttggtcgggtgccatggctcacacctgtaatcccagcactttgggagcccgaggcgggcagatcacctgatgtcaggagttcaagaccagcctagccaatgtggcgaaaccctgtctgtactaaaaaacacaaaagttagctgggcatggtggtgcatgcctgtaatcccagctactcgggaggctgaggcagggagaattgcttgaacctgggaggtggaggttgcagtgagccgagattgcaccactgctctccagcctggggaacagagcaagattccatctcaaaaaaaaaaaaaagaaagaaagaaagaaagaaaacagacttgtattgcacctttgcaaataaccatactgccataatttaaggatactcacaggtagtttccagactcgggagaaaaccaggcagagagaaataagcatgcctcaaattttgttcatgggagcacaccaaactgtcaaaagctgttgatagctcaaaagaaaagcctctttgactctgaaaagcaaacaaaggaccaacaatattccgagcaaaacatcaaaaagatcactccagtctgttagttcagttcacgcagtcagttcctgtcctgcctgatatcaatgaacattccagctcttcaagagtcctgaacgtccttcctctattctgatgtcacaatctgcaaagttatcagaaacctgcattcaagagcacctgtcagaactttatagctgatcataaaaccaccttctaaagaggaccaaaacaagacaacaattgttcatggatgacaaaaagttttagggtggccgcagttaaagacacaattgatgaggaaatctgttacctacgtggcacacaacaattttaacataacaattataattattactgataatgtacactaaaacatatcaggattgtaggagtctcccacaaccttggaacacataccaaaaacatatctacacaaatatagcccaaagaaagccaagcaccatttcgtatttgacaatattttctgtataatttttataccaaataagccaaatttcacctttacattagtgtactatgaatgttaaaccgaattaataaatccttatagacatatttactcaattttaatatttgaccacaaggtaagatttttatagactttttatagccctttacaatttttgttaaagagcaggttagtgctctaagagaaacccactgtgcttttattttaataaaatttaatttacagaaaaactggaggataccccttttagccaatatgtttacacacagaactgcctctaaaatcagcctttcacaactagcccaaaccttcatttttattttatccaactgaaaaaaaaatcctttaacctttcaaacttggcaaaaatccacattctcatgcctccctgcaatctttctaccaaaactatattttacttttcctacataccttgcatgtaaggacagtggcttggaatgttggaacctttccttggaatgttctgggtttcagcaccaaatgtaagacttgaagaaggaagaaagaaacatgaaaagcggctcaacagtcaaagacagatttattttggagaataaacctgagaggagcttctggccgatttctctcaggggcactctctcttatagactaagggtatttacgggtttagggagggagagcttatcacaggttcagaatgtttctggttggaggagagttttattttggggtgagaaggtttctggtcggcagggaagttatctcaggttggcatgtttctggttggagacaggtttatctcagggttggaatgtgtctggttggaggtgtcatttgtagtttatgatcatgctgacattagccattaggctgctgtttttggggtggatttaggtggtttttaatcaagaggaacttaaaatggcagtgtttgtccaagatggtgatgctcctgctctgtgactgagctcaagcgatttgcctgcctcggcctcccaaagtgctgggattacaggcgagaggcactgttcccagccgttggcccgttttctaaagccacgtcttcctctgcgatcatccagaacaacacagattctccacctcctctttttctaagctcttgctgcaaatgctggagaaagaacagtgagcgttcaggctgcagcttggccaaaaggccagcgagggagaagtaattacctcggcaatgacaggtgttccatcctttcttctcccctggaaatatcagccatccatcagccagggccaaacacccacccacatctggctcggaaagcagtaatgtaccaggaagcagctgttttcgagagaagccagccctctgtcagtttactagcttattctctcactcattcaacattcctgtgtttatcataccatcccaggggtggtgtggcttaaggatgggtctcgggctggcctggctgctcctgtttcccgactgccacccactagctgtgtgacctcaagcaagctgcttaacctcccatgccttggtttcctcaaccattaagtgggaggtaacaatagtggcacctacgcatagattgttcttggggggtaaatgaattaatacatgtgagggttggccaggcacagtggctcacgcctgtaatcccagcactttgggaagctgaggcggacagatcacaaggtcaggagttcgagcccagcctggccaataaggtgaaaccccatctctctactaaaaatacaaaacttagccaggcgtggtggtgcaagcctgtaattgcagctactcgggaggctgaggcagaagaataacttgaacccgggaggcggaggttgcagtgagcagagattgtgccatcgcactccagcctgggtgacagagtgagactctgtctcacaaaaataaatacatacatacatacatacatacatgtgacggtctcccagacatgcactccggctccaccttgaccaaggggatggggctcacggttaagtcaaactctcaggctctttctccagagaatttgaactctgagccttgggctgatgacacaaagactcaaatggtggctgcgcctttctcccccaagtgcacccccagagactgctggtgcttcctgctagctggatccccagagctgcttggtccctgttctaggtgaggccattcagcagtccttgtgattttctgagcatactttagccttctagcacactcctctcttcccctaaaattagccaagagtgggtttctgttgcttgcatcccaactaccatcattgggacagagcccctgtgcttgagacaagcagaagatagacttctttcacctggggcctggcttcgtccaacagcagagcccaacctccagggcagactgacccgtgatgggcatgggagcccagaaaaaggccccatccagcctgtgggatcagaggagccttcttggaggaggtgatgctgggcgagtgttaaaggatacctaggcatcagctaggtgaagagagcagggaaggagactccagggagaggaatgtgtgagaaaatggggaggagagggaggaacggttggtgggcagctgccactctgtccactggcagagaagcagccaagtctctgatggagcccaccggagcagcctacctggcttctgtggtcactggctgtgaccccgccagccctgctcagcgctgtgcccagccctgggtgcagggaggtgcggtttgctctcagaggagcagctagctgggagcatccgaggccattagggacaggacgctaatgcatcggcgccccattgattctgcctggcttttgtgaacacgtctgcgctgactaatttgtttaattactcattgccgcatctgttctcaattgccctatgcagatacttagtctgtggctgggagccaagcctcagggtcccttttcctcttccaagatgggtggcactgaacgccgaggccacggcccgtcctgatgtggtcagagatgtcgtcatgtgccactaacaggcgtcgccaagaccagccaggtgcagaccttgggtgggtcctatggggtcctacaggaagcataggcatggtccctggtggtccccaggagcacggctctaacacagccgaggcatagtgtgagcaaagtcagacgcagtggttacaagcaaccccacgtggtctgcttcgaatccagcaaacttttgttttcagtgcccagctccctaagccttctttgtccttaccgtctcttcagaatctgtctgcttcaccctgaatcttgtctattgtcctggctagttcagctggaggccaggggtcggagacttagagaaatgaggagggggcgtggagcaggggctgaggcctgagcggtgagtggggctcggtattgacgatcagcgaacagtctcctggggagtcagcttgaatggggcctgtgatatctgcggccagtgccctcggtatgtcccactcagcatcctccccaggtcagaacacattttggggcagaaccgagttttctcttcactttcagactcaagtccagcttattggggcttatgaagacttccacctcatacaggatgaatgattctcttctccattccctctgctgctcgtggacactcggaggtgggggaaggctctgttcttttacttttctggttctagtttctcagggaatgaggcaggaggagagacatggaaagggagagagataccttccgtttcaaggaatatgcagtttggatgtctgaaaaagatttatggcagagatgctggatggaaaacaaacacacagtttgagagggtcctttttatttttattttattttatttatttatttttttgagatggagtcttgctgtgtcacccaggctggagtgcaatggtgcaatctccgctcactgcaacctctgcctcctggtttcaagtgattctcctgcctcagcctctggagtagctgggactacaggcacctgccaccacccctggataatttttgtatttttagtggagacgaggttttcaccacgttgaccaggctggtctcgaactcctgacctcatatgatcctcccgccttggcttcccaaagttctgggattacaggcatgagccactgcgcctggccaagagggtgtctgggaggccgaagcgggaggatcatgaggtcaggagatcgagaccatcctggctaacatggtgaaaccctgtctgtactaaaaatacaaaaaattagccaggcatggtggtgggcacctgtagttccagctactcaggaggctgaggcaggagaatggcgtgaatctgggaggcggagcttgcagtgagctgagatcgcaccactgtactccagcctgggcaacagagcaagactccgtctcaaaaaaaaaaaaaaaaagttaaacacatgtctaacctatgacccagaaatttcagttctgggtatttatgcacaagaaatgaaaaggtatctatctgcataaaaagacttgaataagatttttcataatagttgtattcaccataactaaaaatataagccacctaaacatctattatgtgaaagagtacccatggaatgtatagcttggatactactcagcaataagagaagtatgaacaagaggtagaatgcagttcagagacaaacacatgaaaaacacaaaagagaggcaaaaaaaggtggcagtggaaggaggaattctgacacatgcttaaccggagttccagaagaagataagacagtgaaggggacatgtgatagtcaaaggcaggccccaatcctcagatcaggaaccataacaattctcagagagaataaatgaacagaaatccatatttagatccatcagagtgaaactgcagaacaccaaagaccacaagaagattttaaaagcagcaagtacaagagagattaccctcagaacaccaacaacagattgacagttgacttcacaacagcaataatggaagacacagagctggatacacaaaggaaattgactacaatctagaatccaaaagattcttgaaggatgagggcaaaataaagccattttcggatacacaaaagctgagagcagctattgcaaagagactctcactaaagggcctccacaccaatgcacttcaggaagaaggaaagaggtttcggacggaaggtctgtgtgcagagggaatggctgtctcagaggcgactcaaactcagtatgtccagaaaggactcacaatctgctctcccagcccagcgcctcctgggactttggcctctgtggatgatgaccacagtcacttgggccagaaacatagacatcatcttgataccccttctccctcacctcccccatatccagtcacctccagtcctgtcatctttgcctcctaatctctttcatctctgcccttttctctccatctccatggccacccagctgccactgcattttgctcaccacctgcaattggccttccagcccctgaacccctctgatctgctcagcccgctctccacaccgaacccgaggctctctctttgaatggcaatctgatagtctcccccctgtttaaaacatgaaatggtatcctactaccctggggataaaaacaagacaaaaacgtttaagaggttagagaggtcttcatgattcagtccccacccacctctcagactcacctcccgccccagcctctctggactcttttggcccctcatgggtgccatcattttgcccacataggctcttgtctgtgctgttttcactatagagtgggtccttcccttctttctttgtctaattcatgacactcatcgtttagtgcatttggcacttcctccaggaagcctgccttgacctccctgactatatcagctctcccccattaaatgttcccctcgtgccatggtcccctcatctgtgacattgatcacatgagcaatttcacatttattcatgtagttagttatagtctggatcctcctttggattttaagttcctataggtaaaagccttcctctcctttggccaccgagatatctccaggactaccatggacatgcagtaaacattcaccagttgttgaatttatgagtgggtgagtggtgcctgccaccctagaatttcccttatttgaaattctagaataagcagattcacttctttttcacatccatgtgaatttttgttcttgtataaatgaatagtaagtaagagccataagaaataattggagaaagaaggaattgggaattgggaagagaaaagagagaaaaacaatagaggcagagcaggggctttttgcagtgatgcttggggagaagaaggaagccgaagggacagcaagtgggtagatggcaggtgactggccccaggttatccagagcagagctgagaccacccagtcctaaggggaaggggctgggaaggaagccactcagctctgccaagcagattaaatacagatcaacaagagcctttcccattttgaaaatgtacattgctctgtgttgctgggactgcagtgagacccaggaggcaggaataaacaattctgagtcataaaatcattaaggcatcaaacatttggatcgatgagcagacacaaaagaatatgcttcctatacacatgttaaaagcctaactcttgacaaggatctcaccgaatctcttgggcagaaggattctgtaatggaaagtaattgcacgccactcatctttgttaatttaagatgagtaaagggttattgattcactctttgtttcatgagctgttttcatattgaatttcagtgaacaaaaatatttttaataaggatttcatgggcttatttggcatctttctctcccaagctgcagagctatagatccaactgccagctggacaaacccaactcatctccagccatggcccctcctgatgtgagcctatctcaggttctggtaccacaatccacccagtgccaagccagacactcacgtatcaccctggatgccctccgcagcccctcacccatccaacagatgccccgtccctgtgcctgctaactccctcccacctctccagctcaaggcctccctcccacgtgctggatcctgcctgttcagacctgtcctgtctcctggtggccaaactggcctccccagtcagtccctgctgcagaaagtggtttctttctttctttctttctttctttcttttttttttttttttgagatgaagtcttattccatcgaccagggcctggagtgcaatggtgcaatcttggctcactgcaacctctgcctcctgggttcaagcaattcttttgcctcattcccctgagtagctgggattatagacatgcaccaccacgcatggctaatttttgtatttttagtaggggtggggtttcaccatgttggccaggctggtcttgaactcctgacctcaagtgatccactgatcttggcctcccaaagtgctgggattacccctgtgagccaccgcacccagcctggaaagtagtttctatagtacaaagccgggggtgctgctcccctgccccacacacctcagcacctccatgttgcttcctgtggagtagacactattgttttgtctgcccagtctcttcttttcttgtgggaatatgcttctggaatatttgtctggaaaaccctctccttttgataactgtctttgcctccctgggactgcagctgacgtgcttgcatgtgtgtgtgtgtgtgcgcgcgcgtgtgtgtgcgtgcatgcgtgtgtgtgtgtgtgtgtgtgttgggatcggcttccaaatcttcctactgggggaatgcccattatccattagatgccactcagtgggaagtggtgccccacccgtccgtggagacctaaggggcttaatagatcctccctgcatagccagagacggatacaatctgggctcagtgaatcggtgctttgactgctcacagcgtagctgagagcttactcccagaatggcgaaggtggcaaagagtccccatagctggtgttgttggctgccatcaccccttttatccaggggcacagctgaaatctgtgccactcggctctgctgggcaggtgggataaatctgccccagcctctgtgctgtccccatccctgctcctgctgcccagcagcctggagtccttctccagacttcctgtaactctctccccaagccaatgccctccctcgggtgaacaagggcccctccttgtgacccatggtgcctggcttgccttggccccagccctcctccctgtgccgaaatcatctctctgtggacctttctccctcatggactcccacctccttgtgggcaggaaccagcccttggccatgttccggctccctagtgcccagtatgtgtttggtgaatttgggggcatgggttggatgatcttggttcagttaccaaatctttctttcctgtccaatcagtcttccaggatctcaaccagttctctcactgcagagtctggagaagcccagccctcattgtgaagggagagccaccgtggtgctcacagcaagacacccagagtcccttccagacagggacacccctggagcgaccctgtttcagaatgaagttatctgggtgggaactcaccaagaatgcacagagggcgctgggctccaagcttcagcatatcctttcactggactccacacaggcctgcggagcaggtggacccaccattctcagaccccccagggccccatagacagcagatctgctgctttcaatcacacccactgcctctcatgccggagtgggggaaatggaacccgcaaagcctgcaggccagggagggtgggaaactggggtgatgtgagcccacagggtggagcactgtggactgaatgcctgtgtcccctgggttcatatgttgaacccctaactcccaatgtgatggtgtcaggaggtggagcctttgggaggtggttaggccgtgagggtggagacccatgctggggttggtgcccttatggttctcccatgtgaggacacagagggcagccatctacaagccaagaagagaggcctcaccagacaccaaacctgccggcaccttgctgtgagatttccagcccccagagctgtgagaaataaatttctgttgtttaaggcactcaa

SEQ ID NO: 14 - protein, 389 aa, Homo sapiens
MLSLRVPLAPITDPQQLQLSPLKGLSLVDKENTPPALSGTRVLASKTARRIFQEPTEPKTKAAAPGVEDEPLLRENPRRFVIFPIEYHDIWQMYKKAEASFWTAEEVDLSKDIQHWESLKPEERYFISHVLAFFAASDGIVNENLVERFSQEVQITEARCFYGFQIAMENIHSEMYSLLIDTYIKDPKEREFLFNAIETMPCVKKKADWALRWIGDKEATYGERVVAFAAVEGIFFSGSFASIFWLKKRGLMPGLTFSNELISRDEGLHCDFACLMFKHLVHKPSEERVREIIINAVRIEQEFLTEALPVKLIGMNCTLMKQYIEFVADRLMLELGFSKVFRVENPFDFMENISLEGKTNFFEKRVGEYQRMGVMSSPTENSFTLDADF

SEQ ID NO: 15 - DNA, 3258 bp, Homo sapiens
gtgcaccctgtcccagccgtcctgtcctggctgctcgctctgcttcgctgcgcctccactatgctctccctccgtgtcccgctcgcgcccatcacggacccgcagcagctgcagctctcgccgctgaaggggctcagcttggtcgacaaggagaacacgccgccggccctgagcgggacccgcgtcctggccagcaagaccgcgaggaggatcttccaggagcccacggagccgaaaactaaagcagctgcccccggcgtggaggatgagccgctgctgagagaaaacccccgccgctttgtcatcttccccatcgagtaccatgatatctggcagatgtataagaaggcagaggcttccttttggaccgccgaggaggtggacctctccaaggacattcagcactgggaatccctgaaacccgaggagagatattttatatcccatgttctggctttctttgcagcaagcgatggcatagtaaatgaaaacttggtggagcgatttagccaagaagttcagattacagaagcccgctgtttctatggcttccaaattgccatggaaaacatacattctgaaatgtatagtcttcttattgacacttacataaaagatcccaaagaaagggaatttctcttcaatgccattgaaacgatgccttgtgtcaagaagaaggcagactgggccttgcgctggattggggacaaagaggctacctatggtgaacgtgttgtagcctttgctgcagtggaaggcattttcttttccggttcttttgcgtcgatattctggctcaagaaacgaggactgatgcctggcctcacattttctaatgaacttattagcagagatgagggtttacactgtgattttgcttgcctgatgttcaaacacctggtacacaaaccatcggaggagagagtaagagaaataattatcaatgctgttcggatagaacaggagttcctcactgaggccttgcctgtgaagctcattgggatgaattgcactctaatgaagcaatacattgagtttgtggcagacagacttatgctggaactgggttttagcaaggttttcagagtagagaacccatttgactttatggagaatatttcactggaaggaaagactaacttctttgagaagagagtaggcgagtatcagaggatgggagtgatgtcaagtccaacagagaattcttttaccttggatgctgacttctaaatgaactgaagatgtgcccttacttggctgattttttttttccatctcataagaaaaatcagctgaagtgttaccaactagccacaccatgaattgtccgtaatgttcattaacagcatctttaaaactgtgtagctacctcacaaccagtcctgtctgtttatagtgctggtagtatcaccttttgccagaaggcctggctggctgtgacttaccatagcagtgacaatggcagtcttggctttaaagtgaggggtgaccctttagtgagcttagcacagcgggattaaacagtcctttaaccagcacagccagttaaaagatgcagcctcactgcttcaacgcagattttaatgtttacttaaatataaacctggcactttacaaacaaataaacattgtttgtactcacaaggcgataatagcttgatttatttggtttctacaccaaatacattctcctgaccactaatgggagccaattcacaattcactaagtgactaaagtaagttaaacttgtgtagactaagcatgtaatttttaagttttattttaatgaattaaaatatttgttaaccaactttaaagtcagtcctgtgtatacctagatattagtcagttggtgccagatagaagacaggttgtgtttttatcctgtggcttgtgtagtgtcctgggattctctgccccctctgagtagagtgttgtgggataaaggaatctctcagggcaaggagcttcttaagttaaatcactagaaatttaggggtgatctgggccttcatatgtgtgagaagccgtttcattttatttctcactgtattttcctcaacgtctggttgatgagaaaaaattcttgaagagttttcatatgtgggagctaaggtagtattgtaaaatttcaagtcatccttaaacaaaatgatccacctaagatcttgcccctgttaagtggtgaaatcaactagaggtggttcctacaagttgttcattctagttttgtttggtgtaagtaggttgtgtgagttaattcatttatatttactatgtctgttaaatcagaaattttttattatctatgttcttctagattttacctgtagttcatacttcagtcacccagtgtcttattctggcattgtctaaatctgagcattgtctagggggatcttaaactttagtaggaaaccatgagctgttaatacagtttccattcaaatattaatttcagaatgaaacataatttttttttttttttttgagatggagtctcgctctgttgcccaggctggagtgcagtggcgcgattttggctcactgtaacctccatctcctgggttcaagcaattctcctgtctcagcctccctagtagctgggactgcaggtatgtgctaccacacctggctaatttttgtatttttagtagagatggagtttcaccatattggtcaggctggtcttgaactcctgacctcaggtgatccacccacctcggcctcccaaagtgctgggattgcaggcgtgataaacaaatattcttaatagggctactttgaattaatctgcctttatgtttgggagaagaaagctgagacattgcatgaaagatgatgagagataaatgttgatcttttggccccatttgttaattgtattcagtatttgaacgtcgtcctgtttattgttagttttcttcatcatttattgtatagacaatttttaaatctctgtaatatgatacattttcctatcttttaagttattgttacctaaagttaatccagattatatggtccttatatgtgtacaacattaaaatgaaaggctttgtcttgcattgtgaggtacaggcggaagttggaatcaggttttaggattctgtctctcattagctgaataatgtgaggattaacttctgccagctcagaccatttcctaatcagttgaaagggaaacaagtatttcagtctcaaaattgaataatgcacaagtcttaagtgattaaaataaaactgttcttatgtca

SEQ ID NO: 16 - DNA, 5893 bp, Mus musculus
tttaaagggcgcgggcgctggcagtcggcggtgcaccggattccagctgttttcgcctgctcctcgccgtctccgccgctgccctcgttcgccatgctctccgtccgcaccccgctcgccaccatcgctgaccagcagcagctgcagttgtcgccgctgaagcgactcaccctggctgacaaggagaacacggtgagggcggcccaggtgccggctgggttggatgtgcactggcaggtcgtgggttcccggacccgggagggtggagggtgcctaccgccattcaccacgcgtgtccccctacagcccccgactctcagcagcacccgcgtcctggccagcaaagctgcgaggagaatcttccaggactccgccgagctggtgagtggcccgtgtggggctgaggtgggtcgcttaggctcccagtagagggcgcccgctcgttggcgctaaatctgcattgtcccagctgaattatttgactcttctttcccgccaaagtgtctcctcagaatgtcctactcgggtcggcctatggtaatagtagagtgcagcgtgacagctaagcacacgagattaccaatcgttgaaagtactcgatctgatgagacactggctagcagtttcctgcggttcggttggcatttgggggttggttcacttggcactctctctcatccaacaggaaagtaaagcgcctactaaccccagcgttgaggatgagccgttactgagagaaaacccccgccgcttcgttgtctttcccatcgagtaccatgatatctggcagatgtacaagaaagccgaggcctccttttggactgccgaggaggtaatcgttcaggacttgctgtgtgtcagaaggctcccgcatggccgtcacaactttttgcccttgggaatggtagctcactgagatattgggtgttccctgaaacaaagggaataatggatgtgaagaattcggtaatgagatggtttgggggacttcagttttaaagtgtgtgtgtatgagagagagaaagagagagagacctacagacctgctaatcgtgaacttctaaacttcaggtggacctttccaaggatattcagcactgggaagctctgaaacccgatgagagacattttatatctcacgttctggctttctttgcagcgagtgatggcatagtcaatgagaacttggtgagttggcatgaaatacccataattcacttagatccagaactggttcctggctctctatcttttgccctgaagcggggctggagggatagatgactgactccagtctccgctctggttaacacacttcctgcttgggcggaagacccaggttctgttatgagttacccctgttggactgcttcccatctgctggtgagctcctctcaccaaggcaactctgaccttgggcacttgcctatacatgcacggacccattcccaggcaagcacaagcaaaacaaactttttaagagctatgaatgttatgttaacgttcatcatgttagtctttccctctgctaaggagcagtagtgagtttttctctttgtacctacatgcttaactttttgtggatttctataagactttggttgtatacttcttaactctaagtgggtccttggaatgaactgaaacagaattagggaataacagtgttaaaagaaaccctgtggggcctggtgtgtgccacagaggttaggagcacatgatagttttgttaaaataaatggcaaactaggagttatgtgtttcctaattggtaaattgagcgtatgacgtgaaataatgagcttgcttgcaaatcatgaagaactaataaaaatataggattaaactgtattaaatatatacctgggttttttgttttgttttacttacatttttgaagcaaggtctcacagtaatcctggctggcctagaatagaattcagtaagtacaccaaaatggcctcttactcagattcccccttcactgttgctgcaggcctaggaacaatcccagcaggccgggccactctactggtagtgtggagaaagtgaagcaaccagtagttcttcaaatttaactttggctcattttactaccactaggtggagcgatttagccaagaagttcaagttacagaggcccgctgtttctatggcttccaaattgccatggaaaacatacactctgaaatgtacagtctccttattgacacttacattaaagatcccaaggaaaggtgagtatccacacactctgccaaggtgcctgggactcactcactgctttatttccagtatttttgctcataaaggggaaatgagcagaatgacaagcggactgtcagtagatgtttctatgacccttagtcaagactgcctccagcttttgtgtgtggtagcttgtgtctatttccagctcccagagatcagtgcagcagcattgtcaagaagtcaaaggctagtcagactgcatactgtgtcaaaaacaaaaccaaccccaggggctggagagatgaccactgaggtttagaaggcactgtggctcctgcaaagtatggtttactgcttaccagttttagttcttagctcccacgggacacctcacaaggctgtaagtccagtcacagggaagtggtgccctcttctggcctccatgggcatcacacataaggtgtctgacacgttaaggcaaaacatacattaaaagttaagtttaaagccgggcggtggtggcgcacacctttaaccccagcacttgggaggcagaggcaggcagatttctgagtttgaggccagcctggtctacagagtgagttccaggacagccagggctacacagagagaccctgtctcaaaaccaaaaccaaaaaaaaccaaaaacaattaaatttaaagacgtggctatgaatgagtatgaaaccaaagtggaggtgaggggaattgctttagacaatattgagtcaaaaggtttattttagaccagtttagctgacattgctctgctaggacattatagaaaaattaagaaggcgtttgtgttatggagggagactgggaaggactggtagggttatggtggcagtgagtgccaggatgggaagcagacgtggaagtaatgaatcaggcctacgctgtgcctgttgtgttgccagggctctgcagtatccattcatgctatactttctgcctgcagagaatatctcttcaatgctattgaaacaatgccttgtgtgaagaagaaggctgactgggccttgcgctggattggggacaaagaggctacgtatggtgaggaccctttcctttttcctcctcaagcccaggcttgattgtccaagtaatgtcactggattattggcctgtgctgagaataccgaggcctcaccgggaacgttttcgtgttgactcttgctaggagaacgcgttgtggcctttgccgccgtagaaggaatcttcttttccggttcttttgcatcgatattctggctcaagaaacgggggctgatgccgggccttacattttccaatgagcttattagcagagacgaggtgagtctgaagtagctttctaacctggggctcttagatacacatctactgatggggacctgagaagtgaggtgtggccactttcaaaagggattgtaatgtgtgaacctttgcctgcaaaggacaaaggggaggaggatgacctcgggaccgggtggttttgagctgtaatgtaggtgctgggacctgaacctgggtcctctgcaaaagcagcaaatgtcccttgtaactgttgagccattccaagtcttggggatccagcctaggctttcatacttgctaggcaagtattccgccacattcctagccctgtatccatatttaatgtaggaatccatacaatcctcagcaaaggataagataccttaagtaacttattaaaccactgacttcctagtacatatattcctgttatcccgtagactcgagtgtacaaactgaaagttcttagtagagcctgtggctgtgaagaaacctctgggtatcagaagggaagggccccggccctgtgtaataataggtgtcaggcagccttgagttgggctagcctattcctcgctttcataattggccgtgaaatacatggtttatttccctcacctgcattgttggattttgtggctggcttggaacaatgtgggccgaactggcctcaaattcatggtgatcttgtctctggctccagaatgctaagattgcaggtgtgttaccaccacacccgggcttaaatacctttctctggataggttaagtgctctctgtgtggccagataagtcacaggagactgaggagggtggataagtcatgcttgtgaacagtagagccccacggtgaccttgaacgactctctcttctagggtttacactgtgactttgcctgcctgatgttcaagcacctggtacacaagccagcagagcagagggtccgagagataatcaccaacgccgttaggatagagcaggtgagtgactgcgtgcaggttgtccttgtccttgctgcggggcgggggtgtcctcgggcttcggggtgctcagcgcccctttgcttgccctctaggagttcctcacggaggccttgcccgtgaagctcatcgggatgaactgcactttgatgaagcagtacattgagtttgtggccgacaggcttatgctggagctgggttttaacaaggtaaagtgttatttatggcctccaccctctgctgtctgtcgtcttgtctctttcttctttctttcacttgttttcagcatttatatattggtgtgactttttcagattttcagagtagaaaatccgtttgacttcatggaaaatatctcactagaaggaaagacaaacttctttgagaagcgagtaggcgagtatcagaggatgggagtcatgtcgaattcgacagagaactcttttaccttggatgctgacttctaagtaactgatcgtgtgttcttcgctgatttttgtccccttgccattaaaagaaaccagcaaaaacaaccaactggctacaccatgaattgtcattaaatttgctaaacaggtgtctaaaaagctgtgtagctacctcagtcctgtttgccaggctggtcactagaagaaagtatacttcaaacaatgggtacttggatccttagggagatcctgtccttggcttttacaagtagtgtggtcacctttgacctcatcaaagtactaacagcactgggccaggttttaggagcagtgaccatcaagcaagcaggtttaaacatttagatgctgtttagggctgtttaaagatgtcggactgcttcctgcaggcatgcagggtctacttaacaagtttgtaaataaaattggcactttgcacacacacacacatagtgctgtcaggcgattaaactatacattttatgaggtagtacctctatgctttttttttttttttttaatgctcagtattatcttgaagtttgcaaatgctatgatggtacagtaaattctgacatttgccctaatagtgtcactttttttttttcttcgagacagagtttctctgtatagccctggctgtacggaattcacaagtgagtttgagcccagtggtgggtacacccgtgggactcttacaaaccaaaacaggaaaagcaagtgttccctgaggtagtttactgtgatctagcttcctcatgaactgacataaccctgatcagtttccttgattattgtatagatgtttttgtaatatgaaaagcctttgtaccttttaaattattgttacttaaaattaataaactcttgaattaacagtcttgaactttcatggcatacaagtattaaatgatttaactaaaaccttaatgtca

SEQ ID NO: 17 - protein, 390 aa, Mus musculus
MLSVRTPLATIADQQQLQLSPLKRLTLADKENTPPTLSSTRVLASKAARRIFQDSAELESKAPTNPSVEDEPLLRENPRRFVVFPIEYHDIWQMYKKAEASFWTAEEVDLSKDIQHWEALKPDERHFISHVLAFFAASDGIVNENLVERFSQEVQVTEARCFYGFQIAMENIHSEMYSLLIDTYIKDPKEREYLFNAIETMPCVKKKADWALRWIGDKEATYGERVVAFAAVEGIFFSGSFASIFWLKKRGLMPGLTFSNELISRDEGLHCDFACLMFKHLVHKPAEQRVREIITNAVRIEQEFLTEALPVKLIGMNCTLMKQYIEFVADRLMLELGFNKIFRVENPFDFMENISLEGKTNFFEKRVGEYQRMGVMSNSTENSFTLDADF

SEQ ID NO: 18 - DNA, 2199 bp, Mus musculus
tttaaagggcgcgggcgctggcagtcggcggtgcaccggattccagctgttttcgcctgctcctcgccgtctccgccgctgccctcgttcgccatgctctccgtccgcaccccgctcgccaccatcgctgaccagcagcagctgcagttgtcgccgctgaagcgactcaccctggctgacaaggagaacacgcccccgactctcagcagcacccgcgtcctggccagcaaagctgcgaggagaatcttccaggactccgccgagctggaaagtaaagcgcctactaaccccagcgttgaggatgagccgttactgagagaaaacccccgccgcttcgttgtctttcccatcgagtaccatgatatctggcagatgtacaagaaagccgaggcctccttttggactgccgaggaggtggacctttccaaggatattcagcactgggaagctctgaaacccgatgagagacattttatatctcacgttctggctttctttgcagcgagtgatggcatagtcaatgagaacttggtggagcgatttagccaagaagttcaagttacagaggcccgctgtttctatggcttccaaattgccatggaaaacatacactctgaaatgtacagtctccttattgacacttacattaaagatcccaaggaaagagaatatctcttcaatgctattgaaacaatgccttgtgtgaagaagaaggctgactgggccttgcgctggattggggacaaagaggctacgtatggagaacgcgttgtggcctttgccgccgtagaaggaatcttcttttccggttcttttgcatcgatattctggctcaagaaacgggggctgatgccgggccttacattttccaatgagcttattagcagagacgagggtttacactgtgactttgcctgcctgatgttcaagcacctggtacacaagccagcagagcagagggtccgagagataatcaccaacgccgttaggatagagcaggagttcctcacggaggccttgcccgtgaagctcatcgggatgaactgcactttgatgaagcagtacattgagtttgtggccgacaggcttatgctggagctgggttttaacaagattttcagagtagaaaatccgtttgacttcatggaaaatatctcactagaaggaaagacaaacttctttgagaagcgagtaggcgagtatcagaggatgggagtcatgtcgaattcgacagagaactcttttaccttggatgctgacttctaagtaactgatcgtgtgttcttcgctgatttttgtccccttgccattaaaagaaaccagcaaaaacaaccaactggctacaccatgaattgtcattaaatttgctaaacaggtgtctaaaaagctgtgtagctacctcagtcctgtttgccaggctggtcactagaagaaagtatacttcaaacaatgggtacttggatccttagggagatcctgtccttggcttttacaagtagtgtggtcacctttgacctcatcaaagtactaacagcactgggccaggttttaggagcagtgaccatcaagcaagcaggtttaaacatttagatgctgtttagggctgtttaaagatgtcggactgcttcctgcaggcatgcagggtctacttaacaagtttgtaaataaaattggcactttgcacacacacacacatagtgctgtcaggcgattaaactatacattttatgaggtagtacctctatgctttttttttttttttttaatgctcagtattatcttgaagtttgcaaatgctatgatggtacagtaaattctgacatttgccctaatagtgtcactttttttttttcttcgagacagagtttctctgtatagccctggctgtacggaattcacaagtgagtttgagcccagtggtgggtacacccgtgggactcttacaaaccaaaacaggaaaagcaagtgttccctgaggtagtttactgtgatctagcttcctcatgaactgacataaccctgatcagtttccttgattattgtatagatgtttttgtaatatgaaaagcctttgtaccttttaaattattgttacttaaaattaataaactcttgaattaacagtcttgaactttcatggcatacaagtattaaatgatttaactaaaaccttaatgtcaaaaaaaaaaaaaaaaaaaa

SEQ ID NO: 19 - DNA, 6192 bp, Rattus norvegicus
tccagctgttccctcttctcctcgtcctctccacctctgccttcgttcgccatgctctcggtccgcgccccgctcgccaccatcgctgaccagcagcagctgcacttgtcgcccctgaagcgactcagtctggctgacaaggagaacacggtgaggacgacggggttgggtatgcactggcaggctgtgcggtcccggacccgggagggtggacggtgcttaccgccactcacccttgcttgtctccctacagcccccaaccctcagcagcgcccgcgtcctggctagcaaggctgcaaggagaatcttccaggactctgccgagctggtgagtggcccgtgtggggctgaggcctccaatagacggcaccacgccgatggcgccaaagctgcattgtcccagctgacttaatttgactttcttctttcccgccaaagtgtcccccttgcatgtcctacttgggtcggcctagggtaacagtagcatgcaacgtgacagctaaccacaccagaccgcccatccttgaaagtacttgacctgatgagacactagcagtttcagacggttcgcttggcatttgggggttcacttggcattctcatccaacaggaaagtaaagcacccactaagcccagcattgaggaagagccgttactgagagaaaatccccgccgtttcgttgtctttcccatcgaataccatgatatctggcagatgtacaagaaagctgaggcctccttttggactgccgaggaggtaatcattcaggacttgccgtgtcagaaggctcctgcgtggccatcacaactttaagatgtgcctagattccccttgggaatggtagtttagtgagatatctatcgggtgctctcgtgaacaaatgggattctgggtgtgaagagtacagtggtcaaatgatataggggatttaatttttaaaatgtgtgtgtgtgtgtgagagagagagagagagagagagagagagagagagagagagagagagacctgcctacctgttaaaaccgtgaacttctaaacttcaggtggacctttccaaggatattcagcactgggaagctctgaaaccagatgagagacattttatatctcatgttctggccttctttgcggcgagtgacggcatagtcaatgagaacttggtgagtttgcgtgaaatacccatcattcacttagagatctagagccggtgcttgaccatattatgccccaaatgggggctggagaagatggctggcttcacactctccactctgggacttcctgcttgtgcggaagacccgagttctgttatgagtatacatgtcgaactgcttcacatctgttttccagctctgacaagtcacactgaccttgggcacttgcctgtacatgcctgcacccattcaaaggcgtgcacgagcaaaataaagtcttgaagagctatgaatgtatatgttagcattcatcttcgttttccccgctctgttcagtagcagtagtaagtcttctctttgtacgtcctactagcttagctttttgtgggcctctataatactttggtcgcacattacttgttctaagtgggtacttggagttaacgggaacagaattagttaataacgaaatgtttaaaagaaaccctatggggcctggacagtggcactgaggttcagagctcgtaacagttttattaaaataactggcaaaataggagttacatacatttcccggttggtaaattgagcgtatgacaaaattataatgagcgtcattgcaaaacacgaaaaattgtaataaaaatagagggttaaattgtattgaatgtatacctgttttttatgtttttgaaacaaggtcctaatgtaatcctggctggcctagaaccaagatggcctcttactcagattcccacctagtgttgcagcaggcgaggccacgttactggtagcctggaggaagtgaagtgaagcaaccagtagttttcccaagtctaactgtggttcattctactaccactaggtggagcgatttagccaagaagttcaagtcacagaggcccgctgtttctatggcttccaaattgccatggagaacatacactccgaaatgtacagtctccttattgacacttacattaaagattccaaagaaaggtgagtatatatacacatgctctgcccgaggtgctcacttattttgttccaagtatttttgttcataaagggaaaatgagcagaaaacggactgtctgtagatgtgttagtgtcaagactgcctcaagctcttgtgtgctagcttgtgtctggaattccagcacacagagaccaatacagcagcattaccaagaagtcaaaggctagtcagatgaactgctgtctcaaaaacaaaacgagccccaggggctagagagatgacctcttgcacaagttttagctcctggcccccatggggcagctcaccacaggctgtaactccagtcacggggaaatgatgccctcttctggcttctgtggttataaaagcataaaattataagtggaagtgaggggaattacacactctagaaaataaatcaaaaggttcattttaggccagtttagctgacgtattactccattagattataggagaataaagaaggcttatatgttatggaggtaggctggaaaggactgggttatggtggccactgaacaccaggatgggaagcagatgtagaagtaatgaatcaggcctatgagatgcctgttgtgttgccggggctctgaggtaccgttccatatcatactttctgcctacagagaatatctcttcaacgccattgagacaatgccttgtgtgaagaagaaggctgactgggccttgcgttggattggggacaaagaggctacgtatggtgaggacacttccctccttaaacccagacttgattgtcccaagtaatgccactggatgattggcccgtgctgagaatgcagtggtctcacaaggaacgttttcgtgttaactcttgctaggagaacgagttgtggccttcgctgcggtagaaggaatcttcttttctggttcttttgcatcaatattctggctcaagaaacggggactgatgccgggccttacattttccaatgagcttattagcagagatgaggtgagtctgaaatagctatgtcttagatgcgtgcccttccatccactgatggggacctaagaaagggggtgtggtcactcagaaaaagggattgtactgtgtgtgtgtgttgcttgcaaaagaagacaaaagggaggatgaccttggaactgggtggttgtgagctctgatatgggttctgggagctgaacccgggtcctctgcaaaagcagcgcatgctccttgtaactgttgagcaaactgtcaagatgttccaagtcttggggattcaacctagggtctcagtgcttgcttgctagggaagtgtcctgccagactcccagccctgtgtccacatttaatgtgaatccaatcacacagtactcagggaagaataagctaccttaagtgatgtattaagactactggttttcccagcacatattcctgttatcctgtaggcttggatgcataaaccaaagctcttaacagaagttctagggtatcagacatgatcctttgtacttccgagttaattggtaagcctcctgctgaggagagtctttgcttgggctccttgtaggttcttggggtagactgaggacagacagacttaatagtttgtcaggtctgaaaagcaatgagcagaaacctcaccatccctggagcccagtggcagggcaagtgattaccttcctgtgtaggaagataagccctggggttcactggggtgtcatgtgctgtgctaagactcgccactttgtgtcatttgaaattgtgcctgattcctgagtcttaaaagctaactgaccttctttgttgagaactagagcttatggctgtgaagatatttgagccaactgttgtagcctctgggtatcggaagggaatggctctggtactatactgtaataggtggcagccttgagggccttgaatgccttgagttgggctagcctactccttggtttcataattgacagttcaatatccggtttatttttctcgcctgtatcattggatgttgtggctgtctgtagcgtggctggcttggaacagtgtaggccaaactggcctcaaactcatgggtgatgggggggggcggtcggtcttgtccctggctccagaatgccgggattccactaactacaccaggcttaaataccttcctttgccctcagcgtggccagacaagttgcatgaggttgtaaggatagataatctgatgcgtgcgaacggtaggagtcttcagcctcacggtgatcttgaactctccctcccagggtctgcactgtgactttgcctgcctgatgttcaagcacctggtacacaagccctcggagcagagagtaaaagaaataattaccaactcggtcaggatagagcaggagttcctcacagaggccctgcctgtgaagctcatcgggatgaattgcaccttgatgaagcagtacatcgagtttgtggccgacaggcttatgctggagctgggttttaacaaggtaaagcgctgtttttggtctctaccatcctcccctcttttctatcacttgttttcagcatatatatatatatatatatatatatcaatgtgacctttttcagattttcaaagtagaaaatccatttgacttcatggagaatatttcactagaaggaaaaacaaacttctttgagaagcgagtaggcgagtaccagaggatgggagtaatgtcaaattcgacagaaaattctttcaccttggatgctgacttctaagcaaccgatccgtgtgctctttgctgattattctccccttgtcattaaaagaaatcagcaaaaccaaacaactggctacaccacgaattgtcgttaaatttgctaactggtgtctaaaagccgtgtagctacctcggtcctgcttgctaggtttgccactagaaggaagcatacttaaaacaatggctacttggatcctcagggagatcctgtctgcaagtcgcgtggtcacccttagcttcatcaaagcactaacagctcacccggccaggcttcatgagcactgaccctcaagcaagcaggtttattaaacatttagatgccaacctcacttactgtttcctgcagtcatggagagtttacttaacaagtttgtaaataataaaactggcactttgcacacagacttggtactatcctaggggaaggcctgctttatttggtttctagaccgagtaggaagtgatccatttaccactgagggcagccccattcagagtcttaagtgactaagccagtgttgaacaagcaatttccaggctttgttcttcagggaacttcccatcagctttgaagtcggtcctgtgcaccctaggcacatggatcagttcacaagtggggttcagtggagagaacttccccctcagaagtcacttgaaacttagatgagatttgggacacttgctggttgactctgtctcatttgtgtaaaaagtatttttttttttcaagttatactttgtcccattcctagttagtacaaagtcttgaaagggcctttgtagggctttttaagtcagggtcttaactatgtaactctggcttggcctggaacttgctatgtagaccaggttaccctcaaacttgtctgtcttcccaaatactgggattaaggtttctgtgaccatacctggctttacctgatgaattcctaaacaccagaaaaccagtactgtatgagatgttaatgtgtgttcctttcagactggagtacagaccagtagataacagataacagctggttcaccttaatctgcctttttgtgtattaatctgtgtttagagaacggaacaatagccagaattcacctagcgagttcgaggccagttggtgtatatgtgggactcttaaccaaaacagcaagcgttccctggggtagttcacaatgatctccagcttccttgttaaccagataactgcaagtcagatgtatgaccctggttggtttattgtattgatatgtttctgtaatatgagtaaattattgttacttaaaagtaataaattcaagtttcaaaattg

SEQ ID NO: 20 - protein, 390 aa, Rattus norvegicus
MLSVRAPLATIADQQQLHLSPLKRLSLADKENTPPTLSSARVLASKAARRIFQDSAELESKAPTKPSIEEEPLLRENPRRFVVFPIEYHDIWQMYKKAEASFWTAEEVDLSKDIQHWEALKPDERHFISHVLAFFAASDGIVNENLVERFSQEVQVTEARCFYGFQIAMENIHSEMYSLLIDTYIKDSKEREYLFNAIETMPCVKKKADWALRWIGDKEATYGERVVAFAAVEGIFFSGSFASIFWLKKRGLMPGLTFSNELISRDEGLHCDFACLMFKHLVHKPSEQRVKEIITNSVRIEQEFLTEALPVKLIGMNCTLMKQYIEFVADRLMLELGFNKIFKVENPFDFMENISLEGKTNFFEKRVGEYQRMGVMSNSTENSFTLDADF

SEQ ID NO: 21 - DNA, 2563 bp, Rattus norvegicus
tccagctgttccctcttctcctcgtcctctccacctctgccttcgttcgccatgctctcggtccgcgccccgctcgccaccatcgctgaccagcagcagctgcacttgtcgcccctgaagcgactcagtctggctgacaaggagaacacgcccccaaccctcagcagcgcccgcgtcctggctagcaaggctgcaaggagaatcttccaggactctgccgagctggaaagtaaagcacccactaagcccagcattgaggaagagccgttactgagagaaaatccccgccgtttcgttgtctttcccatcgaataccatgatatctggcagatgtacaagaaagctgaggcctccttttggactgccgaggaggtggacctttccaaggatattcagcactgggaagctctgaaaccagatgagagacattttatatctcatgttctggccttctttgcggcgagtgacggcatagtcaatgagaacttggtggagcgatttagccaagaagttcaagtcacagaggcccgctgtttctatggcttccaaattgccatggagaacatacactccgaaatgtacagtctccttattgacacttacattaaagattccaaagaaagagaatatctcttcaacgccattgagacaatgccttgtgtgaagaagaaggctgactgggccttgcgttggattggggacaaagaggctacgtatggagaacgagttgtggccttcgctgcggtagaaggaatcttcttttctggttcttttgcatcaatattctggctcaagaaacggggactgatgccgggccttacattttccaatgagcttattagcagagatgagggtctgcactgtgactttgcctgcctgatgttcaagcacctggtacacaagccctcggagcagagagtaaaagaaataattaccaactcggtcaggatagagcaggagttcctcacagaggccctgcctgtgaagctcatcgggatgaattgcaccttgatgaagcagtacatcgagtttgtggccgacaggcttatgctggagctgggttttaacaagattttcaaagtagaaaatccatttgacttcatggagaatatttcactagaaggaaaaacaaacttctttgagaagcgagtaggcgagtaccagaggatgggagtaatgtcaaattcgacagaaaattctttcaccttggatgctgacttctaagcaaccgatccgtgtgctctttgctgattattctccccttgtcattaaaagaaatcagcaaaaccaaacaactggctacaccacgaattgtcgttaaatttgctaactggtgtctaaaagccgtgtagctacctcggtcctgcttgctaggtttgccactagaaggaagcatacttaaaacaatggctacttggatcctcagggagatcctgtctgcaagtcgcgtggtcacccttagcttcatcaaagcactaacagctcacccggccaggcttcatgagcactgaccctcaagcaagcaggtttattaaacatttagatgccaacctcacttactgtttcctgcagtcatggagagtttacttaacaagtttgtaaataataaaactggcactttgcacacagacttggtactatcctaggggaaggcctgctttatttggtttctagaccgagtaggaagtgatccatttaccactgagggcagccccattcagagtcttaagtgactaagccagtgttgaacaagcaatttccaggctttgttcttcagggaacttcccatcagctttgaagtcggtcctgtgcaccctaggcacatggatcagttcacaagtggggttcagtggagagaacttccccctcagaagtcacttgaaacttagatgagatttgggacacttgctggttgactctgtctcatttgtgtaaaaagtagtttttttttttttttttttccaagttatactttgtcccattcctagttagtacaaagtcttgaaagggcctttgtagggctttttaagtcagggtcttaactatgtaactctggcttggcctggaacttgctatgtagaccaggttaccctcaaacttgcctgtcttcccaaatactgggattaaggtttctgtgaccatacctggctttacctgattaattcctaaacaccagaaaaccagtactgtatgagatgttaatgtgtgttcctttcagactggagtacagaccagtagataacagataacagctggttcaccttaatctgcctttttgtgtattaatctgtgtttagagaacggaacaatagccagaattcacctagcgagttcgaggccagttggtgtatatgtgggactcttaaccaaaacagcaagcgttccctggggtagttcacaatgatctccagcttccttgttaaccagataactgcaagtcagatgtatgaccctggttggtttattgtattgatatgtttctgtaatatgagtaaattattgttacttaaaagtaataaattcaagtttcaaaattgaaaaaaaaaaaaaaaaaaaaaaaaaa

SEQ ID NO: 22 - DNA, 7354 bp, Canis lupus familiaris
tgcgccgccgccgccgccgagcccgcctgccgccgccatgctctccgtccgcgtcccgctcgccaccatcgcggacccccagcagcagcagcagcagcagctccagctctcgcccctcaaggggctcagcctggcggacaaggagaacacggtgagcgcgcgcgcgggcccgggggcggggacctgagggccggggctgcccctcaccgcgcgtctccccgcagcccccggccctcagcggcacccgcgtgctggccagcaagaccgcccggaggatcttccaggagcccgccgagccggtgagtggcggggcggccggcggggaagcggcctttgcgggcggggcgctgccggcagggggcgcccgccgcctgttggcgccaaagcctcattgtctcccctgcgtttctaacccagccactccccggcccgcgctcctttcccgccaaggcattccctcccgctcctgtctgcccttcctcacacttgcgcacactcccccctttcccctcttgcaccccggttgtgttctctgtaccatgccgtgtgtgacagccgacacttgacacgccgaaccacacgggattgccggtaactgaacgcgctgggccgcaaaaagtggcgatttcatgtggttcgccctaccagagacatttcattactttctcacccccacagaaaactaaggtacttgcccccagcgcggaggaggaaccactgctgagagaaaacccccgtcgctttgtcatcttccctatcgagtaccatgatatttggcagatgtataagaaagcggaggcttccttttggacagccgaagaggtaacccgaggcaggagctggggccctacaaggttaagtgtagtaagcgttgcccccagaggaagccccctgcaggagtggatgcaacttgcttgaaatatacttaactcttcctcttgcccctcttggggatggttgcccactgaggatgtgagacgttctaagtggcaaagggagctgagcatgggagggatgttcccgatcaagtggtgtcaggacacttaacagaagaaggtctaagggttaggtatgtgtgtgtacggccccacatgcttaccgtcccttgtgaacctcttaaacctcaggtggatctttccaaggacattcagcactgggaatccctgaagcctgaggagagatattttatatcccatgttctggctttctttgcagcgagcgatggcatagtaaatgaaaacttggtgagtttccaaaaaaacatctgctttcgttcgcttccagattaaagaaacgggccaagtcattccagaaaaaaactaatcctctttcctcatctttttaagttctgtatttgtaagctggtagttctattacatggtgtttcctgttttataatctactttgcagttgtttcttctttagggttagtcattgtcccccctccgggctcaagaagcttaaagacaatgtcaagtggtaggaataggtttactccttatgactatgacattgtttcttttttgtggctttgcttttttaaaaaaatttgattccatatatgtcttattgtgagtggttccttcctgcagtggactaggaagaaatgaagaatgtttgcagaatccctataaaatagaccttatctgtttcctgatctgtaaattgaggtaaaattttggcataaaatgtccagctttaccccagaatagtgaaaacgtattgtttctaaaaatagaaacaaaccttataatactgcaaagggagtgtgatgtatccaggatcctgagtggatgttcctggagctgaattgtgatgtgttttaccactaggtggagcggtttagccaagaagttcagattacggaagcccgctgtttctatggcttccaaattgccatggaaaacatccactctgagatgtatagtctcctcattgacacttatattaaagattccaaagaaaggtgagtatttgggtggtctgccaacgtgttcaggattcactaattgttaaaatatttcaacttttcgcggttacataggggtagaaggattccaagtgactaggcaggcagacaaggcagtttctactgcccctcgtcctgtgtgctctgaggaagaggcctaaactcactttattagccagtcacttaaaaacaagtcatgagggacacctggatgggtcagttgttgagcgtctgccatcagctcaggacatgatctgaggtttccgggatcgggtcctgtattgggctccctgcatggagcctgtttctccctctgcctgtgttctgctgcatctctctctgtgtctcccatgaataaataaataaaatctttttttttttttttaataaaatcttaaaaaaaaaaagtcatgaggttactccatttttagagatgggagtatactgttggtcattgaatccagtgtctttcttccaaaataaaacacatccatagaggctgtacgatgaaggaaatcctaggtctgacagtttttactcatgtgcaaatctgttaacctcaaacgagaagctggggcaaagtggaggggaatagaggacacatccaaatagaacgttacttttcctcttaaagaccttgtaatgtggtacagaaaataagtttaagagagagattctagagtgaagcaaaggcagcagtttactgatagatgagtttaggcacaggactgtgtgaggagatgggtttgcattatgggatcacagaggagaaatcaaggtagcttgaggccagttttacattttccagattggagaggaggagaaagttagaaatggccgtgtgagtggtctagataccaaggtcaacttcaggatgagagtcctgcgtggtacagaagtgatagagctgtaaagtaggctcttgtggcttatctggaataatgtgaaggggaaaaatgagtggtggcttggaagggctggcaggcttcgggagacaagtttatagaccgaaatgaggaaggataaacataggcctgactgagataaataaacagaatgggcagtaggatcaggagggtctggtggttcaaaagctagggagaggcagaccctggtctcaggatgtcgacatggaaagagaatgaagagagcaatgtggttgctctaatgaccttgggttcagaagacaaggtcacctgataaagggacaggctggggaatctagactcccaagctgggcacagagatacattgaaggcggaagaggataataaggaagaactaggcaagtcggggggacagttgatttactttcctgatctgggatcatcagtgtaagtatagacttataagtaggaagcaagctcagattattcggtttattggctttaattattttattatatccatatggcatttggggcctatataattagcccgatatgattagtgaagatggtgctacctaggaagataatggtcagcgtagcttaaatagtcttagcagttaagattttatggcttctcaagtttaaagatagggcctgtgaactttgtcatgacctggacttgatataataaaagccgataaatgttcttggtgtaatggactaagacttttaaggttagtagatctcagggctccttgtgaagtaaagaatacctatttcggtattaacaggagccaaatgaatgttgggattttaaaaagaacacttggtggggggtgggaagcaaaaaaggtaatgagaaaacatttcagttttgagtctcaatttcgccttggtcccagtgttctctacatgtttgtggtaggaagtctttgctgtaattgctgatattctgggtgtctcctagggaatttctcttcaacgccattgagacgatgccttgtgtaaagaagaaggcagattgggccttgcgttggattggggacaaagaagctacctatggtaaggccacttggccccacggatgcctgagtttcatcctctaagtgacatcatggtttgttggcccttcctgtgcacatgtacggttgctcaccggaaccatgtcggtgttaactcttcacaggagaacgggttgtggcctttgctgccgtggaaggaatcttcttttcgggttcttttgcgtcaatattctggctcaagaaacggggcctgatgcctggcctcacgttttccaatgaacttattagcagagatgaggtgagtctaattcaggctaatgtgcaccccaaacatctacaactctttggttcactgaagggaactcgataaaatgtcgcctcatgtccacattgaacatgaattcagccatatctgggcttggtagaacatgaaatatattgaaagtacttgtattctcaatactcgtccagtctcctgtatgagcctactgtgctccaaagttggtcgataagcatcctaaaggaagtgagaatccttctggtccagtgtcctgtctttgactgcacttggattaagctggagggaaaggcgaagatgtctagatgctctcatttgattctagttggcaaagccagagccacagaccctgtcatgcttggagcccagtgaccaataagttgatcttgctttgtaagttcttccttctgatctaggaacatcagggttacttggcactaagacttgtagactccattcactggcagttgcatcactgatttcctgaccattaggttgtaaatctcaaaaccagccaagtcaatctcaaagcagcctagtcactgctgggaatagtggcaaaatgagagctcacggatgtagaaaaaaatgctttgagctgaagtcctaccctgtcctgtgctcctgtatggggcagcagggaacagacttggcctgctgtcattgccctgggtagcagtgttgagggccttgggataaggctgaacctgccgtgacctacacagagcagatggcagtcgaaatccttttccctttgacagttttaagtgcttttagtatgttcgcatgagacatatgaggagaatgcagaaaagggtaaagccatttcctgtttcacgttaacgatagacgtctggttttatagtgatcttaaaccttttcttctagggtttacactgtgactttgcctgcctgatgttcaaacacctggtccacaaaccttcagagcagagggtgaaggaaataattatcaatgccgttaggatagaacaggtgggtgatacaggagggtctcttgtgctcaccagaagaggtctttatgcttctgttctattgagaagctgcgtttcgatccctaggagttcctcacggaggctttgccagtgaagctcattgggatgaattgcacgttaatgaagcagtatattgaattcgtggcagaccgacttatgctggagctcggttttagcaaggtacagtattgtttatagccttctggttctcctgaaactgctgttctgtatttaaattttcctgtgaaccttttcaggttttcagagtagaaaatccatttgactttatggagaatatttcactggaagggaagactaacttctttgagaagagagtaggcgagtatcagaggatgggagtgatgtcaagtccaacagagaattcgtttaccttggatgctgacttctaagtgaatgaagatgtgctctttgctgatttttttttttccctttctcatccaaaaaaaaaaaaatcagctacttgaagtgtatcaaaccagctacaccatgaatcatccataacgttcattaatagtattgttaaaactgtgtagctacctcataagcaagcctgttgatcagttaatgctagtcgtctcacccagaaagaagcatagacaaaaagctactcggattcttaatgaaagatattggccgtgtttggcttttgcgggcaggctggctgtccactgacttcacagtggctcttggtggcagtcaggtctcaaaagtgtggggactcaagtgagtctgatctagcacgattaattagttagtctaaggcccttgggcggtgtcagcctctgtgcttcaaagcagatttttaagtttacgtaccgatttttatataaaactggcactttacacacaaataaacatagtttgtactgttgaaataaaggcttgatttaacttaatctggtttctagcccaaatgcagagcattctattgaccactaatgggagccagtttgcaatttactaggtaaccaaaaagtccatcaaacctgtgtgaatcaagcatgttatttctgtttattttctataatgaattgatgttctctttaatcaactttaaagtcaatccttcatatacctaggtattagccacttggtgccatgaagaaacgcaggttgtgttttatattttggaggccaggtcaagtattgtggataagaggggaaaggaggttccaattaaatcattagagcttgaagtgtgatgtaggctgactgctggtcgcctgggggtgtgcgaggatcagcatccttttatttctcaaaccacattttcccccaccttgagttcttatagaaagaagatccttagatccttagctgtagggtctgagataatattgtaaattgattttgaaatcaatccttgcacgaattgacccgcttaggatcttgctccaattaagtggcacaaccagaactgaaattggctccccggaaagttgagcattttctctgatttggtctaatttgtaagtaggtaatgttgacctaatccatttgtgtctactacatgttttttcaattagatatttcttctgtttttttgttcttttatatctggttcatattttgaaataattgctcagttagtgcagttcatgattggagcagatagtcttcagggcacttacttccagcttttgcctcaatctgagcattaccttgttggattcctgacctgcagtagaaaactagagttgcatgagctatattaatacaggttctgttcacacagtaattttagaaagaagtataaaataatatacttaataggattagtttgaatcaacctgtctttgtgttacccctgctttctccctccccatcaaaaaaaaaaaaaaagaaaaaaaaacaaaaaacccagccaggaggttacgagaaggtggtggatgatacgcactgatcctttggccacatttgttaacctgtctttttgtgttgggtgatcactgacctgtttttttgtcagttttcttcatttattgtataaattgtcaaatagtcaatttaaaaatttctgtaacggtggctgtcttttaaattattgttacctgaagtgaatctagataatgtggttcttacccttgtgcaacacaaaggtgaataaacgtttttgcctcgcgtgtcgggtgcagacggaa

SEQ ID NO: 23 - protein, 394 aa, Canis lupus familiaris
MLSVRVPLATIADPQQQQQQQLQLSPLKGLSLADKENTPPALSGTRVLASKTARRIFQEPAEPKTKVLAPSAEEEPLLRENPRRFVIFPIEYHDIWQMYKKAEASFWTAEEVDLSKDIQHWESLKPEERYFISHVLAFFAASDGIVNENLVERFSQEVQITEARCFYGFQIAMENIHSEMYSLLIDTYIKDSKEREFLFNAIETMPCVKKKADWALRWIGDKEATYGERVVAFAAVEGIFFSGSFASIFWLKKRGLMPGLTFSNELISRDEGLHCDFACLMFKHLVHKPSEQRVKEIIINAVRIEQEFLTEALPVKLIGMNCTLMKQYIEFVADRLMLELGFSKVFRVENPFDFMENISLEGKTNFFEKRVGEYQRMGVMSSPTENSFTLDADF

SEQ ID NO: 24 - DNA, 2974 bp, Canis lupus familiaris
tgcgccgccgccgccgccgagcccgcctgccgccgccatgctctccgtccgcgtcccgctcgccaccatcgcggacccccagcagcagcagcagcagcagctccagctctcgcccctcaaggggctcagcctggcggacaaggagaacacgcccccggccctcagcggcacccgcgtgctggccagcaagaccgcccggaggatcttccaggagcccgccgagccgaaaactaaggtacttgcccccagcgcggaggaggaaccactgctgagagaaaacccccgtcgctttgtcatcttccctatcgagtaccatgatatttggcagatgtataagaaagcggaggcttccttttggacagccgaagaggtggatctttccaaggacattcagcactgggaatccctgaagcctgaggagagatattttatatcccatgttctggctttctttgcagcgagcgatggcatagtaaatgaaaacttggtggagcggtttagccaagaagttcagattacggaagcccgctgtttctatggcttccaaattgccatggaaaacatccactctgagatgtatagtctcctcattgacacttatattaaagattccaaagaaagggaatttctcttcaacgccattgagacgatgccttgtgtaaagaagaaggcagattgggccttgcgttggattggggacaaagaagctacctatggagaacgggttgtggcctttgctgccgtggaaggaatcttcttttcgggttcttttgcgtcaatattctggctcaagaaacggggcctgatgcctggcctcacgttttccaatgaacttattagcagagatgagggtttacactgtgactttgcctgcctgatgttcaaacacctggtccacaaaccttcagagcagagggtgaaggaaataattatcaatgccgttaggatagaacaggagttcctcacggaggctttgccagtgaagctcattgggatgaattgcacgttaatgaagcagtatattgaattcgtggcagaccgacttatgctggagctcggttttagcaaggttttcagagtagaaaatccatttgactttatggagaatatttcactggaagggaagactaacttctttgagaagagagtaggcgagtatcagaggatgggagtgatgtcaagtccaacagagaattcgtttaccttggatgctgacttctaagtgaatgaagatgtgctctttgctgatttttttttttccctttctcatccaaaaaaaaaaaaatcagctacttgaagtgtatcaaaccagctacaccatgaatcatccataacgttcattaatagtattgttaaaactgtgtagctacctcataagcaagcctgttgatcagttaatgctagtcgtctcacccagaaagaagcatagacaaaaagctactcggattcttaatgaaagatattggccgtgtttggcttttgcgggcaggctggctgtccactgacttcacagtggctcttggtggcagtcaggtctcaaaagtgtggggactcaagtgagtctgatctagcacgattaattagttagtctaaggcccttgggcggtgtcagcctctgtgcttcaaagcagatttttaagtttacgtaccgatttttatataaaactggcactttacacacaaataaacatagtttgtactgttgaaataaaggcttgatttaacttaatctggtttctagcccaaatgcagagcattctattgaccactaatgggagccagtttgcaatttactaggtaaccaaaaagtccatcaaacctgtgtgaatcaagcatgttatttctgtttattttctataatgaattgatgttctctttaatcaactttaaagtcaatccttcatatacctaggtattagccacttggtgccatgaagaaacgcaggttgtgttttatattttggaggccaggtcaagtattgtggataagaggggaaaggaggttccaattaaatcattagagcttgaagtgtgatgtaggctgactgctggtcgcctgggggtgtgcgaggatcagcatccttttatttctcaaaccacattttcccccaccttgagttcttatagaaagaagatccttagatccttagctgtagggtctgagataatattgtaaattgattttgaaatcaatccttgcacgaattgacccgcttaggatcttgctccaattaagtggcacaaccagaactgaaattggctccccggaaagttgagcattttctctgatttggtctaatttgtaagtaggtaatgttgacctaatccatttgtgtctactacatgttttttcaattagatatttcttctgtttttttgttcttttatatctggttcatattttgaaataattgctcagttagtgcagttcatgattggagcagatagtcttcagggcacttacttccagcttttgcctcaatctgagcattaccttgttggattcctgacctgcagtagaaaactagagttgcatgagctatattaatacaggttctgttcacacagtaattttagaaagaagtataaaataatatacttaataggattagtttgaatcaacctgtctttgtgttacccctgctttctccctccccatcaaaaaaaaaaaaaaagaaaaaaaaacaaaaaacccagccaggaggttacgagaaggtggtggatgatacgcactgatcctttggccacatttgttaacctgtctttttgtgttgggtgatcactgacctgtttttttgtcagttttcttcatttattgtataaattgtcaaatagtcaatttaaaaatttctgtaacggtggctgtcttttaaattattgttacctgaagtgaatctagataatgtggttcttacccttgtgcaacacaaaggtgaataaacgtttttgcctcgcgtgtcgggtgcagacggaa

SEQ ID NO: 25 - DNA, 3633 bp, Artificial Sequence
  Description of Artificial Sequence: Synthetic polynucleotide
gctagcgaattcgccaccatgcacgtcatcaagagagacgggaggcaggaaagagtcatgttcgataaaatcacttcaagaatccagaaactgtgttacgggctgaacatggacttcgtcgatcctgcccagattaccatgaaagtgatccagggactgtactctggcgtcaccacagtggagctggacacactggccgctgaaaccgcagccacactgactaccaaacacccagattatgcaattctggctgcacggatcgccgtgagtaatctgcataaggagacaaagaaagtcttctcagacgtgatggaggacctgtacaattatatcaaccctcacaatgggaaacattcaccaatggtcgctaagagcactctggacattgtgctggccaacaaagatcggctgaacagcgctatcatctacgaccgggatttcagttacaactacttcggctttaagacactggagagatcatatctgctgaaaatcaatgggaaggtggccgaacggcctcagcacatgctgatgagagtcagcgtgggcattcataaggaggacattgatgccgctatcgaaacttacaacctgctgagcgagcgctggttcacccacgcttcccctacactgtttaacgcaggaaccaatcgaccacagctgagcagctgcttcctgctgagcatgaaggacgattccatcgagggcatctacgacaccctgaaacagtgcgcactgatttctaagagtgccggcgggatcggagtcgctgtgagttgtattcgggcaaccggctcatatatcgccggcacaaacggcaacagcaacgggctggtccccatgctgagggtgtacaacaatacagcccgctatgtggatcagggaggcaacaagagaccaggagcatttgccatctacctggaaccctggcacctggacattttcgagtttctggatctgaagaaaaatactggcaaagaggaacagagggctcgcgacctgttctttgcactgtggattcccgacctgttcatgaagagggtggagaccaaccaggactggagcctgatgtgccccaatgagtgtcctgggctggatgaagtgtggggagaggaatttgaaaaactgtacgccagttatgagaagcagggccgagtgcggaaagtggtcaaggcccagcagctgtggtacgctatcattgagagccagacagaaactggcaccccctacatgctgtataaagactcttgcaaccgcaagagtaaccagcagaatctggggaccatcaaatgcagcaatctgtgtacagagattgtggaatatacttccaaggatgaggtcgccgtgtgtaacctggcatcactggccctgaatatgtacgtcacaagcgagcacacttatgacttcaagaaactggctgaagtgaccaaagtggtcgtgaggaatctgaacaagatcattgacatcaactactatcccgtgcctgaggcctgcctgagcaataagagacataggcccatcgggattggagtgcagggcctggctgacgcattcatcctgatgcgctacccttttgagtccgccgaagctcagctgctgaacaagcagatttttgaaacaatctactacggggctctggaggcatcttgtgacctggccaaagaacagggaccctacgagacttatgaaggctcccctgtgtctaagggcatcctgcagtacgatatgtggaacgtcacaccaactgacctgtgggattggaaagtgctgaaggagaaaattgcaaagtatggcatccggaacagcctgctgatcgccccaatgcccactgcctctaccgctcagattctgggcaacaatgagtccatcgaaccatacacttctaacatctacacccggagagtcctgagcggggagttccagatcgtgaatccccacctgctgaaagacctgaccgaacggggactgtggcatgaggaaatgaagaaccagatcattgcctgcaatggcagtatccagtcaattcctgagatcccagacgatctgaaacagctgtacaagacagtctgggagatcagccagaaaactgtgctgaagatggcagccgaaagaggggctttcattgatcagtcacagagcctgaacatccacattgccgagcccaattacggaaagctgacctccatgcatttttatgggtggaaacagggactgaagactggcatgtactatctgcgcacccgaccagctgcaaaccccatccagtttaccctgaataaggagaaactgaaggacaaagaaaaggtgtccaaagaggaagaggaaaaggagagaaacacagccgctatggtgtgttctctggagaatagggatgaatgcctgatgtgtggcagtggaagcggagctactaacttcagcctgctgaagcaggctggagacgtggaggagaaccctggacctctgagtctgagggtcccactggcacctatcaccgatccacagcagctgcagctgagcccactgaaaggcctgagtctggtcgataaagagaacacaccacctgcactgagtggcactcgggtgctggcatcaaagaccgcccggagaattttccaggagccaaccgaacccaaaacaaaggccgctgcacctggggtcgaggacgaaccactgctgagagagaatcccaggcgcttcgtgatttttcctatcgaataccacgatatttggcagatgtataagaaagctgaggcaagtttctggacagctgaggaagtggacctgagcaaagacatccagcactgggaatccctgaagccagaggaaaggtacttcatttctcatgtgctggcattctttgccgctagtgacgggatcgtgaacgagaatctggtcgaacgctttagccaggaggtgcagatcactgaagcccgatgcttctatggatttcagattgctatggagaacatccattcagaaatgtacagcctgctgattgacacctatatcaaagatcctaaggagcgcgagttcctgtttaatgccattgagacaatgccatgtgtgaagaaaaaggcagactgggctctgcgatggatcggcgataaggaggctacttacggggaaagagtggtcgcattcgcagccgtggagggaattttcttttctggcagtttcgcttccatcttttggctgaaaaagcgaggcctgatgcctgggctgaccttttccaacgagctgatttctcgcgacgaaggcctgcactgcgatttcgcctgtctgatgtttaaacacctggtgcataagccctctgaggaacgagtccgggagatcattatcaacgcagtgaggatcgagcaggagttcctgacagaagccctgcctgtcaaactgattggcatgaattgcactctgatgaagcagtacatcgagtttgtggccgacaggctgatgctggaactgggattctcaaaggtgtttcgcgtcgagaacccattcgattttatggagaatatcagcctggaaggcaaaacaaacttctttgagaagagagtcggggaatatcagaggatgggcgtgatgagcagccccactgagaatagcttcaccctggacgccgatttttgagctagc

SEQ ID NO: 26 - DNA, 6 bp, Artificial Sequence
  Description of Artificial Sequence: Synthetic oligonucleotide
gccacc

SEQ ID NO: 27 - DNA, 2376 bp, Artificial Sequence
  Description of Artificial Sequence: Synthetic polynucleotide
atgcacgtcatcaagagagacgggaggcaggaaagagtcatgttcgataaaatcacttcaagaatccagaaactgtgttacgggctgaacatggacttcgtcgatcctgcccagattaccatgaaagtgatccagggactgtactctggcgtcaccacagtggagctggacacactggccgctgaaaccgcagccacactgactaccaaacacccagattatgcaattctggctgcacggatcgccgtgagtaatctgcataaggagacaaagaaagtcttctcagacgtgatggaggacctgtacaattatatcaaccctcacaatgggaaacattcaccaatggtcgctaagagcactctggacattgtgctggccaacaaagatcggctgaacagcgctatcatctacgaccgggatttcagttacaactacttcggctttaagacactggagagatcatatctgctgaaaatcaatgggaaggtggccgaacggcctcagcacatgctgatgagagtcagcgtgggcattcataaggaggacattgatgccgctatcgaaacttacaacctgctgagcgagcgctggttcacccacgcttcccctacactgtttaacgcaggaaccaatcgaccacagctgagcagctgcttcctgctgagcatgaaggacgattccatcgagggcatctacgacaccctgaaacagtgcgcactgatttctaagagtgccggcgggatcggagtcgctgtgagttgtattcgggcaaccggctcatatatcgccggcacaaacggcaacagcaacgggctggtccccatgctgagggtgtacaacaatacagcccgctatgtggatcagggaggcaacaagagaccaggagcatttgccatctacctggaaccctggcacctggacattttcgagtttctggatctgaagaaaaatactggcaaagaggaacagagggctcgcgacctgttctttgcactgtggattcccgacctgttcatgaagagggtggagaccaaccaggactggagcctgatgtgccccaatgagtgtcctgggctggatgaagtgtggggagaggaatttgaaaaactgtacgccagttatgagaagcagggccgagtgcggaaagtggtcaaggcccagcagctgtggtacgctatcattgagagccagacagaaactggcaccccctacatgctgtataaagactcttgcaaccgcaagagtaaccagcagaatctggggaccatcaaatgcagcaatctgtgtacagagattgtggaatatacttccaaggatgaggtcgccgtgtgtaacctggcatcactggccctgaatatgtacgtcacaagcgagcacacttatgacttcaagaaactggctgaagtgaccaaagtggtcgtgaggaatctgaacaagatcattgacatcaactactatcccgtgcctgaggcctgcctgagcaataagagacataggcccatcgggattggagtgcagggcctggctgacgcattcatcctgatgcgctacccttttgagtccgccgaagctcagctgctgaacaagcagatttttgaaacaatctactacggggctctggaggcatcttgtgacctggccaaagaacagggaccctacgagacttatgaaggctcccctgtgtctaagggcatcctgcagtacgatatgtggaacgtcacaccaactgacctgtgggattggaaagtgctgaaggagaaaattgcaaagtatggcatccggaacagcctgctgatcgccccaatgcccactgcctctaccgctcagattctgggcaacaatgagtccatcgaaccatacacttctaacatctacacccggagagtcctgagcggggagttccagatcgtgaatccccacctgctgaaagacctgaccgaacggggactgtggcatgaggaaatgaagaaccagatcattgcctgcaatggcagtatccagtcaattcctgagatcccagacgatctgaaacagctgtacaagacagtctgggagatcagccagaaaactgtgctgaagatggcagccgaaagaggggctttcattgatcagtcacagagcctgaacatccacattgccgagcccaattacggaaagctgacctccatgcatttttatgggtggaaacagggactgaagactggcatgtactatctgcgcacccgaccagctgcaaaccccatccagtttaccctgaataaggagaaactgaaggacaaagaaaaggtgtccaaagaggaagaggaaaaggagagaaacacagccgctatggtgtgttctctggagaatagggatgaatgcctgatgtgtggcagt

SEQ ID NO: 28 - DNA, 57 bp, Artificial Sequence
  Description of Artificial Sequence: Synthetic oligonucleotide
gctactaacttcagcctgctgaagcaggctggagacgtggaggagaaccctggacct

SEQ ID NO: 29 - DNA, 450 bp, Unknown
  Description of Unknown: CK8 promoter sequence
ctagactagcatgctgcccatgtaaggaggcaaggcctggggacacccgagatgcctggttataattaacccagacatgtggctgcccccccccccccaacacctgctgcctctaaaaataaccctgcatgccatgttcccggcgaagggccagctgtcccccgccagctagactcagcacttagtttaggaaccagtgagcaagtcagcccttggggcagcccatacaaggccatggggctgggcaagctgcacgcctgggtccggggtgggcacggtgcccgggcaacgagctgaaagctcatctgctctcaggggcccctccctggggacagcccctcctggctagtcacaccctgtaggctcctctatataacccaggggcacaggggctgccctcattctaccaccacctccacagcacagacagacactcaggagccagccagc

SEQ ID NO: 30 - DNA, 455 bp, Homo sapiens
ctgctcccagctggccctcccaggcctgggttgctggcctctgctttatcaggattctcaagagggacagctggtttatgttgcatgactgttccctgcatatctgctctggttttaaatagcttatctgctagcctgctcccagctggccctcccaggcctgggttgctggcctctgctttatcaggattctcaagagggacagctggtttatgttgcatgactgttccctgcatatctgctctggttttaaatagcttatctgagcagctggaggaccacatgggcttatatggggcacctgccaaaatagcagccaacacccccccctgtcgcacattcctccctggctcaccaggccccagcccacatgcctgcttaaagccctctccatcctctgcctcacccagtccccgctgagactgagcagacgcctccaggatctgtcggcagct

SEQ ID NO: 31 - DNA, 2220382 bp, Homo sapiens
cgttaaatgcaaacgctgctctggctcatgtgtttgctccgaggtataggttttgttcgactgacgtatcagatagtcagagtggttaccacaccgacgttgtagcagctgcataataaatgactgaaagaatcatgttaggcatgcccacctaacctaacttgaatcatgcgaaaggggagctgttggaattcaaatagactttctggttcccagcagtcggcagtaatagaatgctttcaggaagatgacagaatcaggagaaagatgctgttttgcactatcttgatttgttacagcagccaacttattggcatgatggagtgacaggaaaaacagctggcatggaaggtaggattattaaagctattacatcattacaaatacaattagaagctggccatgacaaagcatatgtttgaacaagcagctgttggtagctggggtttgttgccgagctcttcaaactctgcaaacagtgttgcttttacagaatggattttaaaattgccttgtgctgcgttagattttggggagggggtgtgcttgcctccaacctcaggaaaacacttctgggatagaaatcagtgttagaagattttagaataaagtattgttcaggagtctaggtttcttcaggtagatgatgacagggggaaaaaaatcttcggggaaatctaccccagattagttatatgcaatttagttgcaagaactgattgatgtattggcatattcagacagtgagagaaatgagaatgtacagaatgtttggataggttgaaaattgttatacttggtttctattttataaggagtttggctgtcagtcatttctcctcatcaatttctagcttttgacatttattcagtcattctgcattatatgaagaaaatatatcaatatctcctgcagggtttttcaacaactctagcatctgtttcagctattgaactgtattcacgttttgccaagttgatgtcgacccagctggtctatgatttctcgcttgattactgctcttaatttctctgtatcagcttgtttcagatagggctttgaaggctgttaatgaaaaatgacagaagtgataaattattgaaaatgtgagcatttatttatttatttatttatttatttatttattttgccctttaatgagttttgtcttacattctttcttgcctgcgtacgatttttagaaccctttctctgttttgcaatatttctttcccctacaatcagtggattataattataagtacttttaagcaaatggagcatgagcatggacagtatttggctccaaaaataaagtttttggagaaaggggagcaatttatgctttttgtataaactatgcatcgtttctataacctatcttcacatgctgtcatggggatctgtcagtgactgtaatcagactgaacatattgaaataatctttatcaccactagggtaacaagcaaataaaacattcaaacatttaacaagtgattgtttaaaacagatgttaaataatatagaaatagattttcctaagtgtgaaaagcctgattattaactgtctatgtaatacagaatctttcggctctctacccagtctcctccatagcctgaggagctaaatcatccaagttaatagactatcatatatgtacatctaatatgacctttcagtgtacacagtgctactcgtatgtgctgtgccttttctgtagtaattgtaatatcccagtcagtctggttaaggaacactattggctgttatgtaactttttttctgaatgttagtccatggttttcaattacgtattcctcttagaaagggtgagttaaaaacaacatgtatttaaatatcagtaaattaattagcaagtggtgggctaattacactaggatttctccaaaataattgctaacttctgttttgaaaaatagtcaaggatttggatgactactttttaaccttgaagcatacattaccgtggttgaatatcattcataattcatatatacagcaggaaagaaaatagttttctagatgtatcattttagcagcaaagaatttttttttataatgtggttcaggcactctgattatttccgtttaatacttttaagtactgtagatgcttttgtatagtgtgttacagaacttggttaatctttgggaagctcaaagactgacagaattttgcatccaaatgctacagggttattttgtggttggttgagaaaattcagctctgtctatactgttgtttaaaatacagccctctttggccaatgttacttttcaactttttataaccgttttaagtgaccattcaagactgtaaaaactcttttacactgcatctttagtaggactctccttttgtgaattgtctccttcgaaaaaatgtgagcttccttctagcctcactctcttgttaccatagttacttttaaaagaaggtttttctttttcaatgaagatagcgtactttaaatcagccactggaatccccaaactgtgtttttgtattttttagtttatagtttaggcttgcttcatttgcggttagaaagtgctctgtatttggtcccactgatgaatggattggacagacgctaggtggcaccagctgttgattattaatgaaatcgtaaagtctatatgccacgcacctgaagagcaggcaaacccttattgataaatgcattgtaagagctggaaatgtctgccaatatttcttgctctaaaacagggtcagcctgcagagtgatgagaccacgtgaagtcttcaaatcccaattgcttaatcctgtgtcttctgaagtgctttaaggaagaaaaaacgatgaaggagaaatgcataaaaatagaaggtgtgaaagagaagtgggacacaatgaaatagactgcaaacattttaatatatttttaaatccagaattagtgacttttataaatctatgtgagttttccccaattctctcaaactcagattgttttctctaaggcatttatattctaaaacaattatttatctcttttaggtaaaaattttattgagcatcattattttttaagtaaaaaaatctcccttatttctctttttgtgataagactgtcaagtgaaatttcccacatgagctagagtagctgcctctcaggtgttgctcttcagaaagatgagcaggggaagacactatcggttaagaaatatgctttgaaatgttttgcctgagaagcttgctccatcctattatcctcccattctcatataatccatcttttaagaaggaaaaagcaaataaaaacaaaccacttaagcatgtgcatacacacacacacacacacacacacgctttggaaaaaaaaaaaagtcagaactgtttaaaaagagaaagccacgacaatattttagttggtcctggagttaataaactaaagtgaaaaataggaaggaaagtccataattagattgtggagagtaaataattacttaaaactggaaatatttttccagaaaaatatgcaatattttttcttcactgggagtaactgacaattcctgaagaaggtgagatggtttagaaagagtgcaaagataatatatgctgtgattctccaatgttatctgaaaagtatgtaatatggctagttatcttgattatagcatggactttggtaaagatttttatgatgcccatatggtgaaaatggagaaatatttgctgtttgacataagagtctggtcaataaatcagctggctaaatgaccctgcctgtgatgtatcaattaatgaatcacagtaaaccaggaagagggcctttcacaggactatagcatagttctataaaattggttccatctgacttgaacctaatcttctgtaatgtgccttatgtctctgttcttgaacctacttggcctgtgaaatattaatgtccaaaaactgaaggacgatccagatagcctgtctatctgggaagcagaacaaatacattgaactattagggtaccaaaggattatgaccacctaaaaactgtggtgaggtcaaagagaataattgtaataggaataagtataacatcctaagctaaggttcataaaatcaatctggcaagtacaggacatgagagagttaaagcttagtaataattaattgaataaatcttactgattttgttggtcatcattattatcagtcataattcatatgacatcaaaatacaatgaaacaaagtaatattgttagacatgtatcctgaaaaaggaaatgaaaaaaatgagaacgaattttagaaggatatatatgatataatggtgtgtgtgtgtatatatatgataggtatggtatatgtatatattatatgtggtaatatatacatattttagaaggacaccatgatctaagaggaaccttaacatttgggggtatgttcagtgaaaagtgtctgaatgctaaaaggtcctacaaactataacatttgaggggcatggaaagtactagaaaagtgaaaagttgaagaatacttgaaggaaaaaagtagagaaaattaagctgatttcaaatattcgatgtgctataatgcagaagagggtttagactcacttgcacctctttggtagcaatggaaaagtattcttccagttaatgttgtgagcagagaattgattactttgtgagacactgcactccttattcctaaagtgttcagtgctaagaatggagtttctgcactaaatggaaattgaagaagatgtctgagataatttttaactaagaatctgtgagtccaatcatttcttttaaaaacatgttcttttttttagacatttatttctctgagggtctctactactccactcgcatcatccaggctaggggtcagtaaatgatagtccacattgtcacatctattactgtttgaccagtcatttaaaatggttttcacgtttctgaattgtttcatttcaagaatatttctgacacatgagattatataaaatttcaatttaagagtctatagtttatttggaagacagccacacccatttatttgtttatatgctatataggactcctttcatgctaaaacacagttgagtacttatgacagagaccatgtgggccacaaagcaggaatatttactatctggccctcgataggaaaagtttgctcacctcatctctagactataaagaaattttgttttttgcttattgactcaagtatctaaacaagcaatgtaacagttaaataacagttctataccataaacagaaattgtaaccacccatactacttaagtactagagacttggaaaagtagttcaaatatgcagcctaacagataaagatggtttcatttggctgttagtctattgagataatttacttgttgaggaatgtttatttaatgtttccataaaaaattgaagtctctgcaatcattgacttatatataatatctgcctagtttgactccattaatcttgctgaatttacctatttggtaggattctgttatttttattgctgcttttccgttagtgtatgatttcagtagacttacagaaagggtgaaagtcaatggaaaacaaggtaaagtgagtggaattttcttcttgcagctaccctcttctctcttcgtgggtttatagactctctcagcagctttggaattgcagttttagagacttacttttataacattatgagtgtgttcttgatcaaatatgttctagaagggatcaagataaaacaaatgcactgcactataaaagaacagttaagggttttagtaaatgattgataagacatgctaaatttaagaattagcaatgagttatttatattttcctgaacatagggatatgagaagggattttttttcatgtcataggagaaactataatcaaattctaagcataaagctgagggattctgaatttaccaccaaatattacaatctccatagttccataatgtgcaactaaaatccccacattttttttctagggaaagatataatttctgctcactggtagcgctggaaattcctgtaaaacccataggattcttattgtatttccatgaggatgttcctgagcagctactttgtgatgcctgtctctatggtaacagacacaaggcttaagggtctgaaagaaattcttcctgttggcttaggaatatggagcaatgagggagacccactgaagactataaaactgaggaaaggcaaaagaggcaattgagaaaaagttgtcgtgggggagctttttttgtgtatttgaaaataatttcacaatttcatttgctcttaatatatctctgaatgaaataagaaccaacatacaagtaaagttttacagaaagaaaaaattctgtgaaagtattgttttttaaccatctagtcaattttatgtaattgaagtcacacagattttttctttagttggcttgcctttcgctactcaagaaaagattgcttcttgcctgaaattggtaagaggacggctctacccctggcaaatttagttcttgttactgctatcaaagatcttgatcttttaaaggactttctttttcctgattccaagggtaagaatattgaactctggttcacattactcataatcactgagcttctcagggaattatgaaagtacactagccttccaagatgttcttttttaggtctatttctcttaaagaccagtaataaatagagcaaatagtactgcttatttgaaaattgggtatttcgtaagaggatgctgggtgagagtttgtgtttttacatgttttactttgtttctcttattaaaataacaaaaaagcaaacaaaaagctcctagaagtttaaaaatatttgattttccatttatttgacttcatcttactttcagcttagcaaatagggacacatcacatttgaattgttttagaaaggagataaatatgactctcctttcccttagattcaaagtatatgttcaaggtgtcatcaaatagccaaaagtctttaaaatatttatgctatgtaaatgtccttcaggaaaatataagtcagagggaggagatggccgtcttagtataaagctctcatgtgtatttgcagtgttaacatgagtgttgatgttttatttatcttcttaacatgttatatctgcacatgtcttcatttgttatatgttagggtcaacagaaaaaataataaagttattgcaagtaagcaaaaacttataacctgatcaataaaaattaatattttaggttggaagataaacacatctcaaatgtcattttataagatcaagttaacaaatgttagcatgcttaaagctttagaggaattaaatctttttatggtttattttctgaccttgagaaatttatagactctgtgcagatatatgttttcacaaatttaatccactctatatagatattagtaaaatgtaagacagtgtcttcagtacctgttcacactatctttaaattaaatgaaaaaactcaagttagctgtaatgtttcagtgtctcctttgatagtgttggaaagcaaattttttaaagaaaaccttttttataactccatacattttgacctatagatactaattgcaatataaaatgtgacatctgaataaaacaagaatactttaaatattcaatatatatactacttttgaaaagatgacttaaattataaacatataaattatatgcctaacatgactggcttccaaaaaacttattttcttgagctttggggttacagcctaaagtgcactgcagtaaataagcaaatgggtaaaaatattgtctagacaaaagtaaaactgagatgttcttttgagcaaacgtttatagaggaggtacaggatgacaactggaaacgtaggtggtacgcagagattaattgctgtcaatgtacacctgaaggtaaatggatggtgcttatcaaatttccagaagaaatattgacattatgttgcaatttgaagacagggttatgaatacaaagagctaagggaaaataaacttatcagcatcattcagctctggtcatgacattgttacaactgattataacactcccaggataaaatgtgataaggaccatcatagtctgtttttactagtacagatttcttttatacatgctataagtagaattgttcggtccagcaacaataagctggattattgaaagtgacactaatgctaacctgaaattgtatgggttttaggggagatgtgggactcatttatgttctatgacaagtgtaaaaaggagattaagtaaaagcctgcatgtgatggacacattagtgagtaggaatctcaggttcctctccctttggctgctgacccattcatgggctggttttggtggccacagtggcaggaaacagagtctatttctccattaggtcatccagacaggattagagcccaccaactgaaatgaaaggttgtttctgctgcttttcattcatccaacaaatatttattgataaattctaactgccaggctctgtgctagagcaagatgactaagatacagtccctgaggaatttagagacgaacgtggtttatgtggatgagaagagaaaaatatttacagtgaatagctaagcagagagcaacagcaactgtgaacccagacagtaaagctgacttaggactgagctagaggtttccggagttcctagtgtgagtgatgtggaaaaactggcaagtccatcaaagagcaaaatgataactgaacagaaagaaagcaaatccagtgaaaaatagtaattcaaagtaaagggtaaagcgacatatttgaagtgtcacttgaaataaaaaggagcatgccttccacctgttgctcatcttcactggaatcaaacctagaaggaaaatgtctaggctggtctaaaagccagttgcatacaatgatattaaatatgattaaagctagcatgagcatgaccatgcaaactttcaggaggatttgaaaacagttacctcccattggtagtttatgtacgtctatccctggaaactttttcctatgctatctttagagaccttgtcatattttatctcaatgtctaacactctttaattagaagctacctgaaaatgtttcactcatgtataaagttaaattaatcacagaatcagacctcagaggttacaaaggagggctgaaaggataacatctcagatagaatagatctattgccaaataaacctgtaacaataagaaattgtgttagataatccgtaaggttttatccaatttcaacatcttccaatttaattgatctccagcctcacacccaactcctcctaggaaattaaaaagagacaggtaaacaagatattttctgaagaatcgaatcatccagaaagtcattctctctcaagcagtacattttctaaagaatttaattatcgaaaaaagtctctctctctcctctttctctctcccttcttctgacatatatagatatgcatatatacacatatatgtatatatttatctatatatctatttatatctctgactcgctgaagtaacttagatatataggctaaaggcaaagaaaaattcctcccaacattcattagtaatttccctttatagattaaggaaagtatttctgtcctccttgatttttaaaacattttactgaactataacacgaatatataaaagttcacaaatcaataggtgtccagcttcatgaattttcacagattgggcacaccccagtaattactcaaggcaagaaaagaatattaccagcatccaaaaactttgtcttaccacttcctagtcaatactctcccagaggtaagtggaatactgacatctaacacaccattgattaggacagacagttcctgaaatgtatgtacttgaagccatacagctgtactcttttgtttctggctcctaaatctcaacattctgtttgtgagatctatctaatttgtttcttgtagttgtggtcccataattttcagtgttgtgtagtatgccatcatataaatgtcctataatttacttattccatctactctggatgaacatttaaattgattccatttgtgaactcttaaaaataattccactttgaatattcttgcaaatttactgcacatatgcatgtagttctgttatgtgccaagaagtagaattattaggtcatagaatagtgaaatactcatctttagttgaaaatgccacgtagtttttcaaggtaggtaaacaaagaaccatcattactttatagaagttctggacatgtcaatgcttagcattattagtctttaatttcagcctttctggctgttatactatagtatctcattgtgtttctcatttccatttttttctagtgactaattaatttgagaaccattttttgtgtttattgctcatgtggatgttatctatagtaaggataacatttcctcccaactttcattagtaatttccctttgtagattaaagaaagtaattctatcaacttgatttttaaaatgttttactgaactataacacaaatatataaaagtgcacttttctaatctcatgctcatttttctattgatttacaattttggtttttataggtatgagatctttacatttttatatggtccctacatttattgtatgtgttgcaaacatctagacagatatcttttataggaacttagaatttcaaaacccggagaccattaaagaatatttagtcccatatcttagtttgaaagatgaggaaagtgtgacttatagagaaattgtcatttcttttaagtttcttccagttagtagtaaggccagatacgtaataaaagtctcctgacactgaagtaaagggtttttttctagtaaaccatgtagggtctttagtcttgtctaatactgtgactcaaactccttgtctcttttggaaggccacaaaatgcgtgacatagtaattttaatagcaagtatagagtgatgcgtgattaatctcattgattttgtgaacaaaaatatcttcagctaacaaactgttgtatagcatggccatgcaatatttaaacctgtatgggccgggcgtggtggctcatgcctgtaatcccagcattttgggaggtcgaggtgggtgtatcatgaggtcaggagttcgagaccagcctggccaatatggtgaaaccccatctctactaaaaacacaaaaattaggtgggctcacgtgcctgtagtcccagctactcgggaggctgaggcagaagaatcgcttgaacccaggaggctgaggttgcaatgagtcaagatcgtgccagtgcactccaacctgggtgacagagtgagattctgtctcaaaaaacaaaggaaaacaaaacaaaacaaaaaaaacctatatgttcttttcggcatcagattttatttttcctctttcataactttattattatattcagtttcttttcacatttattcttattacttggatgttcccattccaaatttggttctaattcaaaaagttttcattttctatagtggatgaagaacaacataaattttacaatactttcttttagtgagataaaatttagtttacaaaacataattactagtacattaatatttactatttatttttaacatgctaggtgcagttcatgcgttattttagctaatctttggaacaacccccgccaaaatgttttattatgcctagtttatagatctagaagctgagcctaagtgagattaagctacttgtgaaacagctctaatcagaaccagatctttataagattctatgcatttcactccttccatgatctacttctgtacctgcttggaaggaaattgagttagtgatacagatttgggtcactacctgcctttagttcttctgccatacataggtcttagggataacctctttttccaatatcattaaataattcattttctgtatcttttttttccaaaacggtaattagagaagtcacttcgttggccttgattttattcattgtattgaataaatacaattttctaaatacggaactcttattcatgtgcaacctaaatacggattaggtgagttaatatccagagaccagattattactaaacttttcttgcatttagagactgaacttattataagaatcttttaattctttttagcaacctattccaaggttgattacttctcatgcatattttagttccaaatatttctttctctttcttgttcattggagaagcattccacagatgcctgagaaacaacttgctctcagtctctctatcttctagtccttggctagagtccccttgccacacttccctagcttcatgcagagtagatactcaatagtacttccacttagaaatttaaatccagatgagttacctagcatgctactttcctcttaaggagtaagtgaagcaaatgtttatagttgtttcactgtatgtgaacaaataggaatgtcaataaaacaagtacatttaattcataagtacttgataatcttaattccttaaatgtataaagctttaaaattaacaaaatactttcaagtttaatttattcacataggaaccatatgaggtaagcaaggtaggaagtcttatttcctctttatagagagccatgtaactaatttctcctatttgtatcctaaatttcttttagctctgccatcccccctccatatctcctgacagtcaccaccttagtttagatccccatatctgacttcgaatacactgatagcttcctaatgtaccttccttcttgcttctctccagtttacccttcacaaggctgctaggcttatctctctcaaagacaaaacttaataagttattccactgcttaaagtccacaggtggctttatattatttatagattataattcaaataacttgcatgaagagaaggtactttacaacaatttccctgccatgtgctcagtctaatcttatatccaccatgtgaatgcctcaccctagccatacaaacagttctctgactgtaacacacttccttttcatgtgcctttggaaatgttgactccatcccacagtcataaacaattcttattcacatatatttacttggtacatgctttataatcctccaaaatagtgtagctagtgcctcttctttacttttggctgaatcatgcacccctgtgcatagaatcttcctaatacttgtttcaccacttattttgctgtgatgtacttttcaggttattgatttattcataaactattagtgcctgagggccatgaattctctattctttttttttttttaccctttgcttagctcttctggagggagctactcaagtttaacttaaagtagtaatgagttacacagccagtaagacatttgtttgagtcctaaggtgacatcatttccattgcatccttcttccctctaatattactaaccatagtacacgagcagtactattgtcaagattcctcctcattcagtttagggaaatgcgttgacccaagttaccatttttgtctatttcacaccgtaaaagtcgggatatttagttatgatggtatgatagttaccctacatggtattttaaaggctctatttcctttgtgacttacacatgacctccccagaggtcttaatttaatggaatcatcacctaaaataatagaagagtaaattgacagtttcgtttataaggtacatggattcaggcatattggtaaagtaacacaaagcaaaaatgtggttcttcatttgtcttgtttcatcactaatagaaaatgatggagttcaccaatcacccaattgtactgtgcagcatggttattgtaaagtatacctgaaattaaaagcaaatatctacttccattttttccactgaattttcatcagaaaatgagaactacatactgaaggatttggggttggcgaatagcagatgtataatgccagcaatatgaaagcagagcaaatgcgtgattggtttacagcctcaacttcagtagtactctgcaaagtctgccagcacacaggtgccttgaggctgcaaagagcgtaggaattcagtggatgtatcaaatgatatgagatgttaatacctacttccttctaatgcatagctttgtgatattagaaaattaataaagaagtgaacaaattaattactttataatctcctaaatcttctctgtggaaggaaaatctcaaagatgcattaagtatccagcaaattggttttgaaattatccattattaaaaagcacaattctgtgtaacaggaagccacatgccaagagctatgtatatttaatcatttatgtcgatgctttttgtagcaattctgtttattctctattgacattatatacagtcctttttatacatagtggaatttaatgtgctgtgtttaaaagacacatcaagcctgacagaatccaattgtatacattatacttttaatttattagaaaatgaaatgatcatttgtgggcttatattagccaaagcagaggataaattttattatattaagaaaatcaaatactgtgactacatttacaaacattgtaaacatgacacttgttgcataattaataaatgaacatattgacctttaatataaaacggcatgaaaggaaagggaaggtggaagatataaccacaatcagaagtggaaatgaactcaaaatctgtaactgtatattaaagaaacatgtgattcatgattgcttttttgccttttccattttgaggcaatagtgccatgttgatattcatttgtgctgtcaaattaagggaaaacattgacaatctttaatataacaaagatagagaataaatgcaggtcaaaagtgtgtgggagaataagagaattgatcacattttaagaacaattacccatgtcactgcttaacccaacgtaatgatgtcaaccagtaggatggaagccagcatcaggaagaatcattttccaagcagatggatctgctgatatttttaattgattgaaggagcgttccattatttttaatcaaaaactaatttcaaataaaatggaaacttccatgaagtttgcaaaaatctgtatgcattaaggctcagactaatagaactacaatgttgtgatagttaataatccattatttaattataatgattattgttcttaacacattacacatgggagtttgtgggaactaccctacctttcttgcttctcaggtgagacaaatcattctcctagtggtctcaagtggtactgaacctcattttatcactgatgacatgctcatgaaactcacactgtactggtgttcttttctccgtctcactcacttctttgctgtgcttcctgggatcacctccgaaataagttgctggcactcaaataatttgctcagggtctacttctggtaaaaggcaacccaagacaacatgatattttattattaatagttttcctcatttaattttatatataatcatttttttctgacagggaagtatatttgaggaaataatgagggcaattatcaaaatatgcattggtttgggagttagagaaactgtcagaagtgacacaccaattttgctacatcgtgacttggtaacagtcattaccattctgggccttttattctcttctgaaaaaatggaagcattcgattacaaatcattaaagaataaagaagatagaaagtgatagaaaagataacaaatgttgatcacaccatgtgcaattgcttgatagtagtttccaggagtactataacagactgagactgtatctacttggaactcgtgggataaaataccattatttgatgccgtatgtgctcggcatgaatgcagtgggaaggatagaaaatatttcatatatttgccaactgtagaatatactgtaatagatcaagtttcattttaaaaatacacaggacacatttttttaaaaatctcatatgaaagcccagcaaagaaaagaagaattgaaggtgtagacatcttgaatgaaaacaagaggacgatttgattcaactgccatttattccaactttcaccctataaccccatagacacagctgtagaaaactgagatcttgaagaaagccactgaattagataatatctacgactacttccaactacaaatgtagaaataattgtctttacctactcatcctcagctagaaagcagctaatgggctactttaaatgtgtgatgctttcacaaattaagcaagactgagtacaacaagcacaacaagtccaacagcacaagttttcacaaacagtattggatgtaacaatacatccaaccagtattagatgtaacaaaaattggttaatttcctaatcaattaattaggaaattttattttctaacctgttggttgccagttatgggcttaagatggaagccagcatcaataggtttaaataatacctttgttttaaaaagaagaagtctaattcatagtcaaacatgtgctttggctaagtggctttgttctgggttttgcatgacagctggtgataaattgggaaaatgtgtaagtagcactgtggtaaggataatgttgatgaagatagaatgtttgaggccactttcagggagaataaaaacgacataaagtaatacttaagactgaattttcttagagatgataatctcatcaccaagcctcattttgccattgaaaaatttcttatgaattcaactatcatatttacatcacaatagacagtattataactctttagcatagggattttgctttaacttactttcaaccaatttatatgttaaagctatttatatctctgctgtttcatgaataaagcccagaggtatcttctttcttgactcactgtcatatcttcacatttcatcacatttttgcagttcaaatatcattcacttagtaacactgaaagcatagaaagattaatcagaaatgatttctgccctcaacaagctgacactggttagagtacaaaagccacactgaaagaatatatggagatctatgatctatgatcaatgatctttgaagttactattgtcatttttgggggcaacatgagtcatgcccatatgaaataacaaacttaatcaatgttgtgtgtgttctgagtgctctaccaaccggccacccccacccccccacatctgtctccctctccttggacctttctattctgagacaaaccaatattgaaatgaagccagttaacaaccccacagtggtctctaagtgttcaagtgaaaggaagagtctcacatgtctcatcttaaatgaaaagctagagatgattatgtttagtgaggagggcatgtcaaaagctgagttaggctgaaatctaggcgtcttgcaccagacagttagtcaaggtgtgaatgcaaaggaaaaattattgaaggaaattaaaagtgttacccccatgcacacatgaatgaaaagaaagcaaagcagtcttactgctgatatggataaaatttaaatggtctagacagatcaaaccagccacaatattcccttaaccaagagctaatccagaggaagatcccaactctcttcaattctacgaaggctgagaggtaaggaagctgcagaagaaaagttggaagctagcagaagttggtttatgaagtttaaggaaagaagccacctccaaacataaaagtgcaaggtgaggcagcaagtgcagttggagaagctgcagcaagttatccagaagttctagctaagatcattgataaaagtggttatactaaatgacagattttttatgtagatgaaatagccttctatttgaagaagatgccatctaggattttcatagctagaaaggagaagtcaatgcctggcttcaaagcttcaaaggacagggtgattcttttgctagagtctaatgcagctggtgactttaagttgaagcaatgctcatttaccattctgaaaatcctagggcccttaagaattatgctaaatagacttagcctttgctctataaaagtaacaataaagcctggatgagagcacatctgtttacagcatgatttactgaatattttaagcccggggttgagaccttgtgctcagaaaaatatattttttttttcaaaaatattactgctcattaataatgtagctggtcatccaagagctcatttggagatgtacaaggagactcatgttgttttcatacctgctaatataacatccattctgtagcccatgggtcaaagagtaagttcaacatttatgtctcattatttaagaaatacatttagtaaggttatagctgctgtaaataataaatcttctgatggatatgagcaaaggaaattgaaagccttctgtaaggaattcaccattctagatgccattaataacattcatgattcatcggaggaggtcaaaatatcacatttaacaggagtttagaagaagctgatttcaaccctcatggatgactttaaggagctcaagttgtcactggaagaagtcactggagatatggtgacaatagcaagagaattaaaatgagaagtggagcctgaagatgttgctgaattcctaaaatctcataataaagcgtgaatggatgaggaattgcatctgatggatgagcaaagaaagtgctttcttgagataaaatttacttctggtgaagatgctgagaacattgttgagatgacaacaaaggatttagaatattacacatacttagctgataaagtagtggcagaatttgagaagactgactccaattttgaaagaagttctactgtgagtaaagtgctatcaaacagcagcacatgctacaaagaaatgttttgtgaaagaaagagtcaattgatgcagcaaaattcattgttgtcttattttacaaagttgtcacagtcactcccaccttcagcaaccccaccctgatcaatcagcagccatccacattgaggcaagagcctccactagcaaaaagattacaactcactaaaggctcagatgattgctagcttttttagcaataaattatgtttttgttaaggtatgtacattttttaacataatgctttgcacacttaggctacaaaataatgtaaatataacttttatatacactgggaaaccgaataattcatgtgactcactttattttggtgatctggaactgaacctgcagtatctccaaggtatacctgtacatattcattcaacttttaccctctaacccgcttacttctgtccctgtggctattgctccaacatcatgataaaaacaaaacatcacatagaagtatggcaattgtactaaacgtattgtaccattggcatttggtgtctgtcgtaccatcacaattgagcctcatccttctttgttaacgcttaattcagagaaaattttcattgagattttataaatgagtaatatggctctgattattgccctgtctgactgcttttatctctatacaatattgtgagagttgctaaagagacttctgatgctgccatatatgtaattggatatttttaaattccatacagtcatctaactgacctctcacccactcaccaaaaattacaactcactccatttgcataaagtaaactgtggaaatatatatattttacctttttcaatctaaattattgctcatggagagtctatttcaccacaaacaatgctatatccttaccttaatggagtattacaatgtaattagccatggaaatggaaaaaatgaaagaaactgttatgaacacatcttcccttttaagccaacttgtcagattttgatagaagaaaaactttcaaagtcttcttacgtgagtcaggtcccattttcttatatttgcattctgctagatttacatctgtctatgacgatgatagtaaaggtgataatgatgataaaggttatgcttatgataattcctcataatgggtaactgtaatatcagataatacacgataagatctttaaaagaaagatgacaagtgaatctcataggagttcagagcatggtgaggatggccctgatttttcatttctgtctctctagtgcattttcatacacactcatcatgggggaggagggcactcaactcaattcagtttatgggatttcatcccagatttctaaatacattatacttatgactctgttcattatcccacccctcccttctctgattatggatgtagtgatgctgattatttttatattcttcactatgaaataactatcattcttcatccatttgggcttctataaaaaaaaataaataataaactgggtggcgtaaactaaaaaaataataaactgggtggcgtagaaacaacagagattcattgctcaaagttctggaggctgggaagtccaagatcaagatgaaggcacactctgtgcctgatgacagaccgtttcctagctactagatggtaccttgttgctgtgtccttatatgatgaagaggcgagctggctctctagggtctcttttataagggtactaatcccaaacaagaaggctctgtactcataacctaatcacaacctaaagacctcaccccctaataccaacctcttggggattagctttcaacatttaaattttggaggaacacaaatattcatactatagcaacattgcaagcaaaattagaataatgtattagtactgttgtgtgggatataacatgagcatgttaagaagagaatcactggattttggaatgtggtaaggccaattatctaattctcaggggaaaatactcagtaagactgaggaagtaggccaggcaaggtgactcatgcctgtaaccccagcactttgggaggctgaggcaggtggatcatttgaggtcaggagttcgagaccagcttggccaacatggtgaaaccctgtctctactaagaaatacaaacaaacaaaaaaaaaattttgctgggcatggtggcacactttagggtggctgaggctggagaatcactcgaacctgggaggtgggggttgcagtgagcggaaatggtgtcactgcacttcaccctgggtgacagagcaagactctgtctcgaaaaaaaaaaaaaatacactgagtaattaaatgtgtaaacatcattttaaaaaaacttttaaaactagtttttaaacttttaatactttaaaattttaaatcatctaatcgaacatgtatataaagatcaaaacaaattaattgtttcagtagaacagtggtgcctagagaactttatttctctggacccaattattcttaactcatcaaatcatatatatatctgtttattcatacgccactccatatatacctaagatagatacatagattgaatcatatgaatttgctgatattggtccattttgaccaaaaaatgataagtttttaggattcaaactaatagctctattactgtattgattaagtggagtgataaggtaccagtgcaatatgttatcactccacttaatcagcacagtaagcccaagaaacataaaacataaagaatattttagaaaatgatgatgatgatttcattttatcaaagctatatgctcctttactgaaatcagacaagggaaaatgttcccttctgtagaaactttattaatcccttatgatcttaatactgttaataatggactagactgtaaaggattaggtaactgaggtgttcaatatggatacttgttttatgtttaatcaaatttatctgactctaaataaatttggctgaaactagacagattccttttctattgagacagtgggctctattaagcactatgtctgcataggaaacattacaattaattttgcagtgacaatatgctttttaactaacagactaatggaaggaggactgatgtaaagcataattctcaaaaagaggggggtaaaaccttggtttctactacaattattcattttatagtattgtttgataacacatactttattaaattgtagatgcattgtaagtttttatagtatatgggaatctaaataaaaggagttatttggttgttatgccatatttagcataaatattaccatccatgtatgttgttgacttaaaacactgttattttctaaaatgtaagcatagaaaaagaataaaattcttagttgatattgcagaaatatattgtagtgtttgcagcatgaaaaggttttatatataataatatacacttaataattaatttccaaaggctgcctgtggtcagccttctttgaaagcatggattctggcaaatgagcaatataatctctttaagaccatttaagctcttaatctcttcaaaccagtaccaaagtctgttcattttgttgtaatagttattgtgtattgtttctttttaattgtgtaagtgagattcaacatcacttgtcagataagaaaaaaaaccttcaaaataaacgttaatttttcccattattgctagaaggaacttggcgtttgaaattttagatattcttaaaatttctttttaaaaatttagaattaaaaacacaaaaagaaaaaagaaaaaaatagcatttactattattccccaaaaatgaaatagtaagatattaacaatatatatatgagatatatatcctgaaaattacaaaatgctgataaaagaaatcaagacctaaataatttcagggatatattgcattcatggattggaagactcagcatagtaaagatgtcaattcttcccaaatcgatctatagatttcatgactgaaaacgattaatgtgggaggaattgctctactcaacatgaagaccttagtatatagctacagtaatgaagacaatgtgatattggtggtgagacagaaacatggagcaatgtaataaaatacagaacccagaaatagaaggaaattattatgccaaactgattctttgcaaaggtgtaaaagcaattcaatgaaggaaactatcattttcaacaaatgatgctagggtatttggatacacataggcagagaaataaacttgacctgaacacctcatactttattcaaacattaactcaaaatagatcatggatactaatataaaacctaacgcttatagatttttcatatatgtatgtgtgtgtgtatgtatacctggattatttccatctatgggtatatatgatttattcctgcctttcctttaaacccaatataattgagaattagtgcaggggtttttcatctttcctagttcaattttacattaataatctttatccctttaaagatattgatattgaattgttggagtttggttttcagaacagatgttttacagtctctggtagctaattgagttttcccattcccttgattacttcttgtactcttagatgaaagttgagtatgtttttcagtgtttattgctaggaaatagttgattacagagtcatttactagataacaaacatggaaagtaatatgacaggtttttgcttttaattgtgcttttaatttttattctacatataggaaagggtagttttcaagaggtatattgcaaaacatttgataaaaatctcttaagaaaactgaatcttgactcaataaaggaacatatgtttccaagcttttttgacaatattaaaaaaaaaactagtcctctggtcaaataaattgaagaagtttctacacaagagtcatgtattttatgtactgttgtaggcatagtaatgatcccccaaagacatacatgttctaatcttaggaagctatgaatatgttgccttatatggcgaaatttaggagtcctcaagtctactctcaggttcaattattccttaggaggactcatataattcttaaaagcagttacactcatgattacagtttattacaacaaaaagataaagactgaagtgaacaaagaaaaaagttgcatacaaccgggttcaggaaagaccaggtgccaccttccagttttcctctcctcatgaagtcatctggacagcatttaattatcccaacagtgatgtgtgacaacacacacatcgtattgccaacgaaaagttgcctaagtcttggtgtctagaattgtattggagtttgtagtaggcatggaacactcacatggctgactttagtcatctccagcctctccagagttcaaactgatacagtgtaacctaaaagctgcaccatacattattaaaataaactatctggtattgcccagaagccagtcaagagccagatatttctttggaatgtacagagtttgaacaacccagtcccgttaagttaatattttaccataaaaaggcaaagtttactttgcagatttgattaaattagggactttgagatggtaagattatcctggattatgtggatggaaccaattaaaaataagcacaaacacacaaagatccttcaaggtggctaggtgcggtggctcatgcctgtaatcccagcactttgggaggctgaggcgggtggatcacctgaggtcaggagttcaagaccagcttggccaacatggtgaaaccccttctctactacaaaatacaaaattagccaggcatggtggtgcatgcctgtaatcccagctacttgggaggctgaggcaggagaattgcttgaacccaggaggcggaagttgtagtgagccaagatcacgccattgcactccagcctgggcaacaagagtgaaactccgtatcaaaaaaaaggaagaaaaaaatccttcaaggagtcaaaggagatgttggaatgaaaagcagtgtgtcagagtaatgtgatgtagactggaagatgctatactgcttgctttgaaaatggaggaaaggggccatgaatcaaggaatgtaggcagcctctagaagctaggaaatggattctcccctagagtctccagaatgaacagcgccccattgacaccttggttttagtccagaactctaagaaagataaaaaaaaaaaaaaaaacaaaaaaaaaacaggctgggcacagtggatcacgcatgtaatcccaacactttgcgaggccaaggtggacggatcacatgaggtcaggagtttgagacctgcctggccaaaatggtaaaagcccatctctactaaaaatacaaaaatttgcttggggtggtgatgcacgcctgtagtcccagcgacttgggaagctgaggcatcagaattgcttgggcctgggagatagaggttgcagtgagccgagatcgtgccaccacactccagcctgggcgacagagtgactgagactctgtctcaaaaaaataaaagataaaaaatatatgtacatttaaatcactaagttcatggtaatttattatatgagcaataggaaactagtagagtttaatataattattatgtctatgtttgtgtagatatatacataaatgggggttgtgtgtgtgtgtgtgtgcgtgtgtaatgtcaaagcaaactttccaaatgcttacttcttgtacatcttaacctcaaggcacacaaacacacactcagttgcataaatgcacattctcacattacacacacacacacacacatatatatgacatactacattctgttctagcttcctttaatgacagctcacaaatatgtgagtagaatacactgggtttgacttgggattatgaaattcatggtaaacatcatcaaggcagatggatatctaggtgtttgattatattgatgaacaggttttggtatacaaagtgacacttgttattaaaattttgatttcatacctatttcaaactaaattgcacctacagtccctttgcaagctccactttttagaaattcagctttgtattcactgcatttatgacattcctttgcattttttttttttttacatccacttcgcttaacaagaagacactgaagttctaagtagcactgtataggactgaattattaatacagttcttcagttggtaacaagaatgctcttggaaatatcttgtacatttgtcttctcctggttacttagtagattgagcatgtaaaaaaatcttttgcttaaaattgcagtacatcttaactgacaatacttcttaaccatagtgcctgacaaaacctggatattataatctcgacgtacaatttggtccagcagttgatctctgctcagatcattcaaaagggcaattagagaaagtcaacaatacacatgtctgtaatttagttttctgtacaaacaccataaccaaatgggatgaaaggatttaaccatttgcaactaaaaacagtatagtgctttataaaaagggcctaatcaagcagtatattgattgaaactttgtacagatggttctcattattcacacattctgtgtttgggagttctcaaaacttgctaaatttaatttgtatccctaaaatcaatgctcatagcattttcacagccatttgtgtgtatgcatagagtggtgaaaaatttaagtcacccaccacacatgttcccagctgagatcaaaaaaggaacactctgcattcttgcttcaggtctcatacggtaaacaagtgtcctttcagcggtgtatttaatgctatgtttttcatatttttatgctttttcttggtgattttgctgctttaaatggccccaagcatgatggtgaatttctgtctagtgttcctaagcttaagaaggctgtgaagtaccttagaaagaaaataggttccttaggtaagtttccttcaggcttgagttacagtgctgttggctgtgtattgaatgttaatggatcaataatatatattcaataagatgtttttaaacagaaaaacaggcaaaatgggattatacattgctggttcacaaaaatgttatgagcagaggctcccagaaatctatcattgtatttctcctgggaggaatgcttcagtattcactaattcagtgttcacagtgactttatagaaacacagtgaataacaagacttgactgcacattgtcatccttcatccaacccacttgcatagtgtagggtctacactttccaacagtactaaaaacccagaacgacattcaagttatgcaggtgtattatttagctgtatttgggttctaagacatgagtaaagttatatatttgtacagctcccaactatatacagttgtccctcagcatgcacgtggtattggttccagtactctcatgtataccaaaatctgaacatactcacatttcacagccaactctgcagaacccgcacacaggcaaaattggccctctatatacgtaggtttcacattctgcgaatactgtatttttgatctgagtctggttgaaaaaaatggcatgtaagtggacccatgcagttcaaacccgtgttttctcaggactcaactatgttatttatccttttacttttttattccttttttattcctgtgtataaaaaattgtaccaccagtacaaggaatgtcatgaaattgaaatgacaccattctgtgtttcttaaataaatgtcatacaggttctatgaagaataaattctcttgctaaaaaaaaaaacttgctatttttcatcatttgattttctcatattaacatttttcatcttaaatagtctttctctttactatttcccttcacatttcttgaaaattctttttcttgcccatctgttttgtatctccttattattttctttctgtttttattatgctagccatggtaatgataaaatctccgacttccaactccctgcaccatttggcacttggcaaatggcttttttatgtatttatatttttgttatttatatgtctatatcctaaacagaaccctacgcataagagcaggtggccagtaactaatggcattgataaaatagagccctttacctctattttcttgaaatatgctttcaagaaattccttgtactagatcatcgtgtatcataacattatgaacacagcagcaaaaaacaagaaaaaaattcagactttagtattcgtaagtaatgtcaatacaatatttggtttaacagacatacgatcattttgtttgctatttcaccatattattttttatgtaaataaggtagattatttccaaagtctttctgaatttactaaaatctcattttacatgaccctactttagtaccttaactaccaccctcctaggaatatatctgtggtaagaacagacaggtgtatatatattatagataagtgtctgtctgtgtgtatgcatacatatgtgtgtatctatatattaaagtatgtatatgcaatatgaaggtatgtatatatgcatatatatgcatgaattatattaagcatatgtatatatatattatagttaagtgtgtgtatgtgtgtatgcatacatatgtgtatctatatattaaagtaggtatatacagtatgaagtatgtatgtatatatgcatatatatgcatgaattatattaagtatatgtatatgtgttagatatttatgtatatatgtatatttataaaattatgaagttctacattgaactgggatataaagtccatgatatctttacataacttagaacagcaaaactctcgattcattcttgttttcaaaatccctttagcttcattttctctggtgcatgaaacaacataaaaatccctcttcttgccattaatctcttcaaatcccatgccagatattgtcaacattacagctataaaaattttagaatgttttagggacatcttgagatctttaaattaaaatatccactaaattaacatcataagcctagactcgtaatctttatttttgatctgactttctgtggcttgcaaatttagaatcaggaaatgaaacaatactcaatttttgcagaattagggcttacttatgatgcaaggctaatatggataatttcttaattgactgtatctgctaagacaaaatcaggaaatgacttaattaaaatgaataatttaggtgatattctctatattgtaatccaaattttaaagaagcgaacttctcttagaagaaaaatatacatttaataattggttcaatgttattatagaccttttgtgttctttcagaacataataatggttgctaattttctgggcagaatctcttgataagagagttaaattgactcagattatctgcaacccactggactattgtggtaatggcagatattttttaaatttaattcattgatataaaatatttagtcttttataataagcaattaaacctttgtacttaagccacttcaacaaaaatattacaaaaccattaggcagctacaataggctccatgcatttttaagtacggtttatacagaataaattatttctgtattggaatatcttcttaataatattgatgtttcaagaaaacatccaagctattttataagttatttgaatggagactgaattatatagtagttttttgttgttgttattttaattcatacaccttttcagtagaaaaaggtgccttggttttaactttgttaccccacaagcacagatattaatttttattgcattcttcactaaagtacatcttgcatttgattttcagacatggataagaccatgatagctaatgaatgactaaaataaatcaatactccaaatacttctatgcttcatttttgatggaagtatgagtaagggatacaagctgaaggcctcctatatatagtacttctacattactttttttgttataattttgtaataataatataatcacaccacatacttgtaataaaaatataatattcatctaggctaattggtcaggtcctgaagtaaatatatctcttcacaaaaggccaatgagtgacccacctactggtagattttatgcaaatggttgcatcttgtacacctttattattttttaagtatatttgtttcctacttgtaacctattctaaaataaaaagtttactatctctttgcagtaaaaataaatatcacatatctatatatataaagatagatatggtatacacctcagtatagatataaagctctttatttatttatttgttcatttatttatttatatttatgtttaaatacagacagatttccagattttaaaatgcatttcttctcactgaatattaagggacttaaaccatatactcaatttgtcaaagctgactggggaatataaagaaagggctagatatgtaatatgtgttgctaatattaactagaatcattattttgaagtacagatcttagttcaataacatagcgcgctagagcagaccaaagttattaacttcaattgataaagaattatgaatataattataatcctgttaattatttaacaccgtgaattatgcaaatgcagcaggtattattaatcatctgcaggaaccagaacaatttccctaaaagaacatataaatattaaaaagtctgacttggctctgttatgtactgttagagctttagtgttcccatatgaacactgtttggattcaattatcctttataacatgaaaaatgccccgaatgcatcctctccaaaggccaaatgaatgtcattagagttctccttttgtctataaaatgtttactgactgtgtggtctcgcatgtttgtttatatcaaaatatctttcatcctattaggctaatactggtctgtggcggctggcatcctacttgctaatagcacgttgtgtggatatccttgctgtgagactaagctacatgtgatagtcttgcagtatctaaaaaaattcccaaaattaacatatgttgaaccttccctcaatactaaggaacaacagagcattcaatggagtaattttaactaatttcctaagtatgctcaccctttacagaaaggaaaaaaagaaaaagaaaaggaattccaaattggacctttggaaaacactcaattggggagaggaattggtaaggggcttgaagatctagtttggttaacagattgttgtaaattttcctgaaggaaatattagccctttcctttaaagagttatttgtggaaacctttaaaaaggattttcaaaataaagactgtttgcctcaatatattggagtttaattcctatccatttttactttatttaaagttagacgattaattgattctcagaaaaattatttgttttaaaaggaagaattatttatttcgaaatctcaaaatatttccaaataccactgtgattcttggaatgcaatctttcttgggaaaatgccaaagttgggcaaagactggggtaggagttaggagagcaggcaaggacatgtaggaaggaaggcaaactagggaactattgtgtttttgaatcttttaaactcttagcctttagaacaatgtctggcatagagacttccaaaaagaatggttcaattcaatgtcataagtagcttgtcatttatggcacattcacaataaatgacagtataaatcaactgcgcattggtagacataccagagtcatgactatttcaacattcattttatccatgtgtttccaagtatgataatagctgaacattacgtggtactcaatgaaatttagatttatgtttatgcctcacatcttagcaattatatttgaaaaactggtgtctgtacagaatgttacagtttaaaaaggattttggatgagtaacttttgaaggaggtaggatttggggactctaaaatatttttcttcttatttttattgaatttctgcctgtgactgctttctaccctaacaatagaggcgctgcttactgtgctgcctgctgtatctcactggaaccattagtacttacaatgggcctttctgatctttatttctatatatttatattttttctgagatggagtctcgctctgtcacccaggccggagtgcagtggcgcatggctcactgtaacttctgcctcccgggttcaagtgattctcctgcctcagcctcccaagtagctgggactacaggcgtatgccacgacacccagctaattttttgtatttttagtagagacggggtttcactgtgttagccaggatggtctcgaactcctgacctcaggtgatccgcccgccttggcctcccaaagttctgggattacaggcgtgagccaccgtgcccagcctctgatcttttactctttctaaggatgactcgtgagtgaaatgtcaaactcttttatttatttatttatttttacaaaattaaaaaagatataatctgggaaaaatataacatctgaatttttattatatgtaagtctattaggtggaaggtagaaatagggccagccagtagaaattgaattctttgcatgaaggagagcaaatttaggtgtaatataagaaagaactttctaatagctaaatctgtctcgagttgcaatgatcatgcattcttctctcctcttttatttttggccactgctggatttcagggatcatcatctggactctctctgctccaatacatacttggaatctatttaatcaatgttgttattaaaaggatataattttacatactttaaaagaattttgtccaatactcctcaaaacaatccaatgagctaaatattaatatcctcattttgcagataagtaaactgaggcatagagcatgtattagtcagggtggggataaacaacttgtccaaagtcaccaactatttgagagcacattgaaacttaggcagggtagcgccatagtatcttgttgtaatatctactctatgctgcatctgtcctcagtattacagagacagagtctgggtccccatggctttgtactaattgagactttggattgtttgccccaattttcttctccagactcactttccaacatgacatttatattgctgtgatgtagccacatagaatctctcacctctcacccaaacatgccaggagttttcaagcctctgtgccatttgcctttcccctccatgtcccccacacccatcacagccctacttctaccattctatcagtggaaatctcctacttatttcctcaattaaatgttgttccctctatacatttagcaaataccaggcccatttaggtactccttcctcattttagccaaagcttcagattttcagctctactatgaccatacgttatattaaatcatgtatatttctgttccttgttataaactggaaactgcaagatcaggaaccacatcttcttcatttgtgtacctttagacttcaataagtaaatgcattaaaaatttgtctaaatgaatgatgcacatgtaacataaagcaagagtttcttttcatagtaagtattcaagcaggagctaaattgaccagccagcatcactgtggtaaagaagacaactgcatagggagaaaggttaagctggatacttgtctctatggcctttttgtagctctctcattgcaatttcatgtcatgccttacagctaaaaagtgccagtcagaaatacctatccattgtgtgtggctcaggctagttgattatgatccccaaggcctagttcttagaaaatgtgtttgtattatagtccaaaaggagctactctctgtctcctttcctcactaaattctcttttatatttttcaagtttacagaagctatatttgggcacagacttcagtaatttttcctctgtgcataaacactcaaccaggaaatatttatccctcagagacactgacaaaagatgtgttcttaagttattgctaagaactaatccttttcaccatgggaggaaaacgtaatgctctataatgtgacttatgagactgaaggttttttataacatagaatgaaatgataagagaatactcttgaatatatgtttgtagttaattacagaagtgtgcaaacaaacttctgacattagtttgttttgtctcctaaattaggtatagatttcttttttttttttttgaagttatatttggcattttttttaaattttattattattatactctaagttttagggtacatgtgcacaatgtgcaggttagttacgtatgtatacatgtgccatgctggtgtgctgcacccattaactcgtcatttagcattaggtatatctcctaatgctatccctcccccctccccccaccccacaacagtccccggagtgtgatgttccccttcctgcgtccatgtgttctcattgttcagttcccacctatgagtgagaacatgcggtgtttggttttttgtccttgcaatggtttgctgagaatgatgatttccaatttcatccatgtccctacaaaggacatgaactcatcattttttatggctgcatagtattccatggtgtatatgtgccacattttcttaatccagtctatcattgttggacatttgggttggttccaagtctttgctattgtgaatagtgccgcaatgaacatacgtgtgcatgtgtctttatagcagcatgatttatagtcctttgggtatatacccagtaatgggatggctgtgtcaaatggtatttctagttctagatccctgaggaatcgccacactgacttccacaatggttgaactagtttacagtcccgccaacagtgtaaaagtgttcctatttctccacatcctctccagcacctgttgtttcctgactttttaatgatcgccattctaactggtgtgagatggtatctcattgtggttttgatttgcatttctctgatggccagtgatgatgagcattttttcatgtgtcttttggctgcataaatgtcttcttttgagaagtgtctgttcatgtccttcgcccactttttgatggggttgtttgtttttttcttgtaaatttgtttgagttcattgtagattctggatattagccctttgtcagatgagtaggttgcgaaaattttctcccattttgtaggttgcctgttcactctgatggtagtttcttttgctgtgcagaagctctttagtttgatgagatcccatttgtcaattttggcttttgttgccattgcttttggtgttttagacatgaagtccttgcctatgcctatgtcctgaatggtaatgcctaggttttcttctagggtttttatggttttaggtctaacgtttaagtctttaatccatcttgaattaatttttgtataaggtgtgaggaagggatccagtttcagctttctccatatggctagccagttttcccagcaccatttattaaatagggaatcctttccccattgcttgtttttctcaggtttgtcaaagatcagatagttgtagatatgcagcattatttctgagggctctgttctgttccattgatctgtatctctgttttggtaccagtaccatgctgttttggttactgtagccttgtagtatagtttagatttctaattgttggagagagaatctgtttacatattggtgaccgttacaagcaaatctaaaatataacatcattttacatcatatattaaattatattaaaattcattaataaatttgaaaggaattaattcatatttataataaataacttcagaagattcactgatttaatggaaaaatttgttgataaaattatattaagagaggaaacaaaagacattaaataaatttgaaatgataaatattcagacatttaaaaaattaagtgtattagttcattctcacactgctataaagaaatacccaataatgcataattcataaaggaaagaggtttaattgactcacagttcagcctggctggggaggcctcaggaaacttacaatcatggcagaaggggaagcaaacacatcctcatcacatggcggcagcaaggagaagaatgagagccaagcaaagggggaagtcccttataaaaccatcagatctcatgagaacttacttgctatcacaagaatagcatggggaaaccacccccatgattcagttatctcccactgggtctctcccaccacacagggggattatgggaactacaagatgaaatttgggtggggacacagacaaaccatatcagtaagtatctacataatccatttgtaattcttcccatcccatattcctattacccaggatttgtgtaatctaggagacataaaacttctgaatttgtattatatgtaagtctcttcggtggaaagaagaatgttggctttattttatcattttaatcttagaagattttaaaaccataattcttaactgaaactaagcttattttggcttgttatatataccacataacttaaaattttaaaatgtaaaataccaaaggagttgaaaattatgtccacacaaaaccctgcacatggatgtttatgacagctttattcatcattgccaaaatttggaagcaaccaagatgtccttcagtaggtgaatggataaataagatgtagaacattcagacaataagatgttattcattgctaaaaagaaatgagctactgagccatgaaaaacacatagaggaaaccagtgaacaagcaaatctgaaaaaatctacatactatatgatttcaacaatacgacattctgggaaagcaaaaactatgtagacagttaaaagatcagtgttttccaggggctgtgagggaaatgtatgaatacgtagagtccagaggaattttaggacagggaaattctctgtaatgatgctataattgtgaatacatttcattatatatttgtccaaatccatagaatgcacaacacccaagaatgaacctttactcttaactatggaattttggtgataatgatttgtcaatataggttcatcaattgtaacaaatgtacccgtctggtgggagatgtagatagcgtgggtggctgtacgtgtgtggaggcaggggatatatgagaaatctctgtaccttcctctcaattttgctgtgacgctaatactactctagaaaaattaagttctttaaaaaatgtgcaacactactaataccactatagaaaaatggaaagagtaaagagaacaaatagcttaccgcaaaagaaatataaatgcccaagaaatatgaagatatgctcacggaattagtagaataactaaatcagtagtttttaattttaaatttatttttatgtaaattttacctatcaacctagaaatggtgaatacagtagaagagtcagtgaagtgggcatgccctttcttgttggtgaggttataaatcagtctaatggtttttgaaagcattttggcaatatgcataaagagtgtatttgaccctatgacccagcaatttgtcttctgagactcttccctaaagacatgattaaatagtatggacaaggttattctttgctatgttacttttaagaaaagtggaaatgaccagcaacctaagtagctgaaaaataagggtcagataaacaaatcttggcatatctgttgcaacggaacattaagcacttattaaaattatgttttcaagaatatttagtaagatgaataaaaattgatcacattataaaaatatatagccaatatgtttaatactatgaaatatgtgtgtagaaaaatgaatattaaaataaaatttttcaaaatattaaaacttaatatcttacatgatgaaatgtgtcatgtatgtattttatcttacaaactgctatgatctgaatgtgtcctacataattcatatgttgaaacttaattgccaatatgatagtactaaaaggtggaggacattaggaggtgattaaatcatgagggcagagccctaatgaatgggattaatgaccttataaaaaggctggtgagaaccgagaactaactaggctcttatatttttccatcacttccactatgggaggacacagcatcccttctctctggaggatgcaacgttcaaggcatcatcttcgaagcagagactgggtcctcaccagacacctcaccagcctacagaactgcgaacaattaatttctgttgtttataaattacctgtctcagatattttgttataatggcgccagtggactaagacacaaatattttcttacaacaaagggaaaaaacttactgcataattttgtaaaatcgaattggaatgagatacactgtgttcacaattttaaaaagtttcacaagggcataagatcattatgcttggcatgtcttccttaaaaaaaaatataccatgaagtataatttctaagcattatgtagagagccacctatttctgtctgtttggagtgggcagggtatccacacactattttgaagaggtgcttgcaaaattgagatggaaaaatgtgtacgtacagttcctaaggccttacctggagagtgaattgccctggtttttacaggtaataccacttggaaggaaactcatgcttctccctaaatcagacaatgcctggccttgagtggtgtcagggtcctggtgataatggttattttaacctcctgcttttctacttctagcatattctgcctttggcttcatgcaaaatactgaaggacagcgagtgcatggatactgctttatcgaaccttgttaattggtctctttgctataagaaatacattgtccctgaagccacaatactaacgcgactggttctacatcttaaaaaatctttgatattttacactgtgtctgttacatggctattatgtttaaactcccttgattagattatagaagtttacattggggaagagtatgtaaaagagacagcaattactgccaaaatcttccccaaatcagtgtcttagtccttttagactggtgtaacaaaaataccataaacagggtggcttataaagaacagaaatttatttctcccagttatggaggcggggaagttcaaggtcaaggtgcaggcacgctcactgagcttccaaggcctcttgggcctctcttataagggcattaatcccattcatgaaggtagagccctcatgacccaataaattcccaaaggcactaccttataatatagtcatcttggtgattagaattcaacatatgaagtttgagaagacacaaacaatcacagtatggcatccaaacattacaaagagttatagtttgtctccacagttagcttagtattaaattttcctcatcagcaagataggaaaaggttagttgaggatgaaccagaagttttcacctgatcatattgacatgggtgcctgataatctcatgcctttatgggaattatatgttcttcattaaaaacaaagaattctggcctttgccaatgatggctttaaactagtacaagcattctgggtgtggctgtggtatttgatcaaagctaatatttgctaatttgcatgttcaatgcaacaatcataaaatactggatagtttcaggtctagtttatgcaccacaaaaaagcaatgataaaactcattcatcttcactttaaagtcgttgtgaagtggctgtttccactgggaatatataggtagcatgtaaaacagttgtcttttctggtaaaggggtttcttgctaaggcgtgaccacaaccaagtgattctttctcttttgattagtattcattgtctcttctgagctgtctctagtggatacagtttagaaatttaacataaagaaagaaagagctctcacactgtaggatttgcagcatgctatttaagtgcaactgctaccacagttaaaggatcatcggaaacatcaaggtgaatgggaaagtggagagagtcaaaattcaagaagagacttttatattattaaaatttattcaaactgtaattgtaaaaatggcatggaggaaaagttaaagtcgaaaatatcagcagtatgtaaaaaaggacaatgtaaaacatctaccaattgtcagaatggctagaaaaacatattccattattcagccaaatattcttgcctttacctctccctgttctttacctgtccacccctagactgtatctttcttgcatatttcattttaagattcttgcacataatttagagaactgaagcaactacctagcccatctttcctcactaggccttccttagaatctgcacggagtcaagtttatggcccctttgaaaagctgcagctccttaccaaagttttttcaaatagaagctaagaagggaaggagtaaaagacagcatttgtataaacattagctcatgtaatcactataaccacctatttaaggtagatgatattaatttcattttcctgaggaaacttactgccattcagatcaaaagtcttctgcaaagtcctacaagtaccaaaagaaaaagtcagggtttttacctatatctctctaactctgattatgtcatttttcttttctctcattttggttttcaactatagagtaacataataaccacttactctcaggaaaaaaaaattagaataaaaatttgcagaccttgcttataaagatttaattacatttaaaataaatagagaaaatatttggaaagtttatttttaataatgatgagtttcatttaagttatgtattctctgtacctattatgaaatatattctgtgaagttgtggttatctgatacaggtggaggtggtagacattaagactcttgatagctgttccgcttctgtcccctttctggtacgtggaatcacttccgcactcacttgaagttgagtctggctgtgtgacatgccggatcaatgaaatgtgcgaagaagtgaactgtgtcacttttggacagatgttctaagagccattgaatgttttactgtgttctgttttctctcagacctatcaaccaacaacactcaaaagttggctgctttatcttcctgagaccaacaacactcaaaatgttggctgttttatcttcctgagtgattacagtatgtagccatcccctgcttattaggataggcacagagtatcagcaagaaataagatactaagagaatagaatttgttattactaaagattttcctaaagtgtccgatacgctcaacattgacgattgttttgcagccaaaacagcaaacatatttaagaaatgtgtttaagaatcacatattgaatctgtgattcacatttgttgtgatggtaaaatatttgtgtagttttctccttttttcagcttctattttaaataacataaattgtttgaaattttgttaatggttcttgaaattaaagacgttcagcaatgatatggtcttaatagaaggaaattgttttccatcactgaagattaattaaattttgagtaagaattgagatatgtgcggctaacacagggaattatctctgtgtttctggatgaaatgggattattaaaacatgaaggaactattttcctcttacggtaagagaacagtaacttaatagtgaaaatcagttgatcatcacatgcttgtggctaaatatcagtttgtcctttttgtagctgctgtaatgatatgttattgaaatcatttagggatacttttttgttgttaatttttatggaggtattattgagaaataaaaacattctatatatttaagatatacaacacggtattttgatataattaacatatccatcaccgggcatagtagtctcttttttttgtgatgagaacacttatgatctactccctcagcaagtttcaagtataaaggacattaatattaactacagttaccatgctgtacgttagatctctataactgaaggttcctactctctgaccaacaactccccatttataccactcctggcaaccgctattctactccctacttctataagttcaacattttatattccacacataatatcatgcaacatttgtctttcatttttttctgcccttatttcacatagcatatgtcctccaagttcaccttgttgcaaatcgcaagatttccttctttttatggctgaataatatttcattgtatacataccataatttctttattcatccatacatccacaaacacaggttgtggctatatcttggctattgtgaataatgcagcaataaatgtcagagtacagatatatttttgagatactaatttcatgttcttcaggtaaataatcaacagtgaaattgctagatctcatggtaattctatttttaatagtttgagaaacctccctactattttttttgtaatggctgtaccaatttacattcccacaaacagtgcatgagggtttccttttctccaaatcctcaccaacacgtatttttaaagatacaatgagacaaactttttatttaaaattatagaacaagaatgaatattaccaattcatcaaaaaaaaagtctgtctactatcaaagtctatttttaaactttatgttcttttacttaaatatttttggaaaaaaagataattatgtacactaatgtgtgtgtgtacattcacaatttggcatatactattaatttggtttaaatttaatttggacataataattcttaaaacttgtcagactgcttgataagtaggtattagtgtatcccacctcatctacagagatgaaaactacagcgtaagttatctaaaacagtaagtgtattggatctcaggaagtatcacttcagaggtgttattcttaacaataacactattcagcaaatgctgcaagaataaaatcattaaaataattttctaaacatcaaataagccaaagtgaatgtaagcttttgtgaataagtttagattcagttaaatttctcaaggatcagctaaattttttaatcaaaaatttcaaccaggtactaaaactattttttgtgtcttcctttgacatatgggctatgtatatgttatataaaaccaaataatgggatatttctgattattatacatttgaaacatatcattgtgtctagcttcataacgtagctatcatattttggtaagttaaattgtatgtcaaatgggtgctcagtctggaagactcaaaaactagaatttttcttttttctaaaatttagtaataattgacaaataaaagcatctggtaccattatacttcctacagtctatattctcctatcatgataaaactggaattcatattatattgaaaaacctcttatttttttcttttttcttctttaactacatcctacagtgtaccctagaagacataaattcaaaaatgtgaatagttctgagaggttttcttgggattttaccttttatgaaactgctataatttatagaatctgcttgtgctctgtcacctaaatttaaaaagctgccttttattatttattttttagtttgctccattcagacagtgatgtttcatgtgggagacatcaccacaatggattactttaacttggaataaccttgctttaataattatatggaatacctttcacaagagaaagcattactaggagaaaagccaataaagctatgaaagacatggataaaagtcaacagctgattggatatagaatctaaataatgtgatatgatttaacttacctggatctcataggtaaaatgaagaaatgatagttacatatcagaattcatatagaatatatgtgagataatgcaaataaatattttagtatcatatttgtcacaaaatagtttgtcatcacatattagctcatcccccatggatgtctcttgtcatacggttgatagaattctgtgtccatttgtgtaattttagctccctaaggatagccactatttgtcactcactgttttatctagatagcacagaaactgatagggagtagtcaataactcagtaaatgtttggccagtgaatggatttacaacatccctgtggaaataatggtagatgtgggtctgtttattgcacaccgcaattgtcaggatgtttattgcataaccagttgtcactggttagtctctgtgtttgtttctgaatttgtttagaacaaggctttatttttactaaaaatataacttgagttgctgacgaattttcagtttttactcatttaccttgctgatatagctagctgaatttacatatctatgtcactatttgtatttatctttatctccatatatttatattatatatacttatgtctgtatctctctatatatgtctctttggggatgtgtactgtgtaggtatattttaaccaccagctcagtgagaaagaactcaagctatgattcttagtgtttgcttatttctgtggtgtaaatacttcaaccacatccagtttcaagctatcaacatgatgttgctgagtgtggagctgggatgagataggtagtggccaattattatatagcattttcaccatacagataaaaggatacaaataacctcacaagtgtagacgacagtgaaatgtagtaaaataattaagaagtgatgagttttgaacatttattacagttgctttaatataatttatttaatcataagtttatttaattttaacaagggctatgtttaatagtatgccctcaaaattccttaagatttagcattcagctttcacaatccatagtaaatctttaatttcaaagtctctgttgcttttcattgtaaaactaaacgtaatccatgctttaactcttttctggttgttttcatatgtcctttaaattctcgatgttttgtatgtttctacagtgaatatttgtgagttgaaactttttaaataattcaagaatatacttttgtgtgtgactttgaaattgtatatactgcttgtatgatttctataatctattgccaagggtaataagagctagtcttaaaatcaaaaaggcactatattactctttgattcccttttttttttctcttaatgaagctgaaataactgggcactgaagataaaatatatgttaactagaagagtatttgctataaaataaaaaatttgacacattttggcaaaagttttttttttcggtagtaaacattttactacctagtatcaaatatattaaacttaataaatataagaaaacagagcctacaaatgcaaagtctaaatcctaatttttacctgcaattgttacttatatgagttcatttttctaaattaaaactaaatcaatctactctacctcctattcatggcctctgccactgcagtcctgaaggttggggtgaagatactcacattttacaagtttgtgaaatattaactaaaaaactatggcgaaatataaacatgaacattttggagagaaacacttctgaaatggtagtgtgtagtgtcaggggctccatggatgctgtcccgagtaaaacaactgtaactggtgaaaattgtaataaaataaccatggaaagtctctggaaatggtcttaagagcatatagcaaatggagaaatatttattcaaaacaaaaaaacctgcaaaatctcagtcagaacagtgaaagttaatgacatttgagcaacaatccccaccccaaccccactctctctagctctgtgtgacagaaactttactctggatagacatggccaaaaacagggtgcttcttctacgtgattctcttcttctttttacttatcagcagaagctgctgtggcttatcaccacgtctggtcatagctgaagagatgtggctgcttctgtatctcctgagctaccacacctagcgcagatccttcctctcataaatgagggagaggctaagaccatgaaaatgagaaagaatcatcttttaaacaaacggtgctgagaaaacttgagattcacatgcagaagaatgaagttgaccctttacctcttggtgaggaagaatataaaacgtttgggcagttatctaccttttggacacatacttaatattagctacactatgaattattggtttggggtgagttagtgagaaacgggttccttttatatgtttagcctagaggcaggtatcgagagagggcttaaatgaacatcctacaataaagtttaaatttttcatcctccattgcagctaggtatgatcatgtgacctggttctgataggacataataagaattaatgtgtgaaacttctaggaagagaagtccatcttcccctatcttccttgttatttctcactgttacttggatggcaatgtgatgattggagcttgaatagccatctggactacaaaatggaagttgtatgttgaagaagacaaactaataatataaattgtccaatgtccctgatgatcatggagccactgtactgcctctcaactgtctcttcttatttcagaaagatgcaaacttccattgttcctgatattggttattttggattttctgtcacttgtagctcagttctaatctcaatgaatgcaagagtcactgacaacctgctatagccaaggtactatattaggcactgacaggtctagggtgaaaaagagacatcgcctggttttcacagagcatacttactagtgagaaaagataaaaatcaaatatttaaagaatatgattttgagggataatcacataacctatagtgagtgaatctggatttaagggcttctcaattcaaagaaaagggaaggccactatgaagcagtgatagctgagctgatacatgagataatagacagacctatacatgtgatgatctggataacagaattctatatagggaaacaggaagcacaaagggaggaatggactaaaaaaagagaagcagaaaaattgacttgtgtggttggagtagagagggcaatggtaagagcaacaatgggagatgaggttagaaaatagagtaggagtcaaatgaaacagggtttaataggtgagggataaaagcaaaaccaaaaatatatacttcagaatcttgtcctggcatctgtttttcctccaatcatctcctcctttgtatattttctttcttttttttcttcatctatatatcttctcatttcattcattcaatcacctatacaatgtggtccactgtctccagaatccaaaatccaggattgtatcctactatttttttgtagattttctacattcaattgtacataaaaaactggcctaggaaatccgcaccccatcgtaatttgtattacaaatttaaaaccagtagctctcaaatcaaatttggataagaatcaatgtactactttgaagatcttccgaatatgtatatctgtttataaataacatatattttaaagtgttaacttatgatctttcattgatacatttctgttttataaaacatgatattcatgatagatctattttattcatttcaacatagatattatcttcgctactcttttaaaatagttttgaggttccaacacccagaaagtgttgaggaaaatttgtatcttctaatggtactaaatataatgtaactgactttgagctgtataaaaaaatgattccaaaatgagtcctaactcttggttttaaaggtgatgtaggtgtgaagggagatgtgacaaaaccccaaagattgttacggaagttttggggaagggaatgaaaacaaacccaccgtggtaattactcctaagattgatgaaaatagaaagtcttgtgcagtattagtagtggaatacatacattcttataaatttgcttgagataatgtggacaatgtgtattaaatgttaaaattggcatatataatttgcatgaatatacaaatgggttacatcttattccctaatacaagtgtggtcaaataaattatataagatttataaaatagcaaattatgcagccatcaaattattgaattgtttcagtatataaaagtagaaacatggccagaaactattgaaaaatattacaagtgagttacaaaacaatatatgtagtaggatttttagggtaacatatatcgaagcagaatgtgggaaagatgaagacggagacacagaaaaaactgtcgtttggaaatagtcttcaaataaattgggtgtctatctcttggcaataaaattataagtatttctctttttatttatatgtagctttttccagtgaaataataattattataataaaaagactttttaattcaagacaaaataacgagaacatcagtgtgattagaaggcattacatggggataaatggcagccatgtcatctgcaaacagagacaatttgacttcctatttgaataccctttatttctttctcttgcctgattgccctggccagaacttccaatactatgttgaataggagtggtgagcgagggcatccttgtcttgtgcgggttttcaaagtgaatgcttccagcttttgcccattcactatgatattgtctgtgggtttgtcataaatagctcttattgttttaagatatactccaacaatacctagtttattaagagtttttagcatgaaggggtgttgaattttatcgaaggccttttctgcatctattgagataatcgtagtttttgtcattggtgctgtttatgtgctggattatgtttattgatttgcatgtgttgaaccagccttgcttcccagggatgaagtcgacttaatcgtggtgggtaagctttttgatgtgctgctggattcagtttgccagtattttattgaggatttttgcattgatgttcatcagggatattggcctgaaattttctttttttgttgtgtctcataattggtgggaaatacatatatgttgagaatatatccgttgtttgaaaaacatgacttttatattcaaaagttgtaatctttttatgaagatgcattttcttttttaaggatgaaggaggggtagatgtatttttaagctaggaggaaagaaattcgactttctggcagcttattttgtgaccatgtataaatcaagcaaacaaaagctttcacttatagtaaagttcacttgaagataaaaattgaccaggaattaaagacattgtatgcacttgtctagtttatattacttgagggtggtggtaagatgttttctggcttgtatagcatgcatgtattaaagacctgagacataaagaagcaagtatatttgaggaactaaagtcaagcacagctagaatgaggaaagatgaatgaatcaacatgggttgggggagatatgtaaacagggattacctcatgcagcatcctatagttcgtgtttagcattctggattttataaccaaaaaaataaggagccgcttatgagatttagtcaaacggaataacatcatcatctttatctttttaaagctcattgtgagttcatgtggcagagagactttattgggaatagaggtacttatatagggattggaggatcaacaggctgaggaaagatgaaagaccagtaggaggtcgtagtacttataaagtcataagtgtaatatgattttgattagaatagtaacaatagacactgtttaaaaacactttttagtggtagaatctacgtgtcttgaagcttgattaaatgaaggtgaggaagacagaaatcttaaatgatacaaagttctgacaagagaagtttaataaatagtagttccatttaccaaggtgagaaatatataaggaggagcacatttggggtggaattcgttttgttttcttttgttttttattcatgtcatgttatgtttgaagtggacttgttcagtaagcagcagaaaatatgtgcctggaatatatgcgctcatttaaaagttatttccttttaaataattgctcattctgcagaaaatggctgactttgaatatcagctgttttctttttctttttcaggaaatcattcttgaaatggtaaacatccaagttttatcaaataccaggatataattgcctggtgtgaattattattttgttagtaactataatagataatccacagaaaatcttttggaaataaaagacttgaaattaaaagctatctggaatgttatatttaaggacacagaccttgaatgactgttcttcaagtaaagagtctttgttgacagatatcaaaatgtcttatattatgaattcacctcaacttagaattatgttaaaatgtgtggccttccttgaaacaccacctaaaagaattttcttattgtcaaacaaacacttaaaaaatagtttttgaaaaatgagtaaattggtattgataatcttatagaacatgtgtacagtttttaaaatatattgaatgtaaatagtgtctttctgtgtgaaactaaacaaatattggacacctccaaaaatattttgttctgaaattttccttggattgaaaaaatgactcaaatcccatattctacttacatctttattgtagcatgacttagggctcttctgtgaatgagcgtttacaccttattttaaaaaattatgttttaaaacaatttcctttgaaaataatggttttcaaaggaaaaaaagagcatctagggctcagaaaattttctttatacttgcaattcaaagttattttcctgcagcaatttcttaaatgaagatttttttaattaaaaaaactatattttgttgttgcaagatagaaataataactttgttgttcaaaattgacagagacgagcctaatgacttccttgtctgaccttgtctataaacttggaaacctcacagtctcgtcttcctgttgtcttcggatgtaattttgttggtagctcaggtcatatttgcttgtgtctatagtaactgagcccttttcgactttaggcactgtgcaagttagttggcatatgccacaagaataaaaaataaaaccaacagctattgtctcttggttacaatccttaatgttctaatgacctttctggaaaggtgatatttacgctgagatcctctgaactataaaaattggagggagagagaaggggaagacattcagtacagagaaataacatgtacaatggctcttaagcttcgaagaattagcgaacttagggaaatgatagaggccagcatctgtggagccatgaaatgaggcaggaaagtttgacgggacacctgtgaatctagagtgttttaacttcatcctaaggtcaataggaggccattgaacaatttgaggggatgtcacaatgggatgtacacttgggcattactctgatgctgtttgcagtgagaagaatatagagagggcaagatctcaggagatacagagttttatgttgggtacaggttggccgaagtaaattgtgtttatctatacaataaggttagatgaagtttgcaattgatttagttaaaaaatttcaaaaactggatgaccacataaataggaacagataacctattcggaaatatggcttccccggtccatcagatttcccagtggaatggcacccatgacactaaaggcccaatgtgagatctgcctagttatagaaagtaaaatctttatttttaccttaccctgttcaactgggatattacatcaccacttcgaaagaatttgaactaatcatctatgtgcttccattcaagagaatatttatataaatatctggttttttataatccttaaactaaacctagaataaaaaggccacatcatcatcagtggctcagccagctttccagaaggctggaaagccattcacctcgaggaggctctttcacttttgcggggtggctttgacaagggtagtggcacttatgaaggaaagaaagtagcctcacatgaagtattatttgcagggagcactgacaggctttgcagatgagttgaatggtaggaattgttttggagaaggtaagaatcataaaggattgcctgatgatggattgtggtgtgagtgagctaatattcctaactcagaagcatccattacttaaattaacaactaaggtgtgattgtgtcccagtttagagttcagcttctatttttgcactggcctagtgctctacattctactcctgtctttttaaccgttccttacttttcagatctatataattttatgctttactttttattgatgttgaagaaaaggcatttcttcttcttaagcagctagtatgggtatcataattcagctcaaaatcagttacaaggattttcattgttcaatagtgtaaaaatataataaatatccttgatgcctgtggtgaaatactatcaagcagctaaaaagagtgtattagataagtggttctcaaccaggcatgagtttggccatgaataagacatttgacaatgtctgcagttttttttatcgtaattactgcggaagtggtagcattgtactggcatctagtaggtagaagacagagattctggcaaacatcctacaatgcaaaggacggcctcccccgaacaaacaattatcagtccaaaacgttaaaagtgccacttttgaaaaaccctgtattaattagatccatatctcacaataattatgtaacccaaatatataatattgagtgaaaaaggaaagttgtagaacgattgcaaagcgtgatagtatattcattcttttaatgctagctagcatagcaaaccaaacccacaatttcagtgccttaacacaacagatatttattgtttgctcatgtcacagtccatggcattccatggcagcgtgttgctttcctgcatgtgacgatgcaaggatccagacgtcttccattttgttgctcccccgcatctcttcaacctcagagtcatctgcatacatccatagaatgggaaagaaacagcagagaagatatattagctttttaaaatctgaagctctgaattgacacaaattacttccactcatattctactgggagaaacaaatcaaataaccacacctgcatgcaagaagagctatataatacaattagaggctgaacagcctgtcagcgatactacctgggtatggagtggatcaacatggattcttatggatagctcattagctcaatgaaggatgccaagcactcaagtaaatttgtaaagaacatacacacatacatacacaacaacaacattatgtattgtttatggatataggaatgtatgtgaaaagcagaacaattgagctaaattaatgaacataaaattcatatatcatggcctcttataaagacgagagcaggagaacaggcctggagataaggaagtaaagtgttttcacatgtatttgaatcattttcttttataattagattatgcacaataaattaggacagattattcataattatgatttcctggagatatgtactcattgtataagtctctggacttctctaattttacctttctcaaaagaaaataaataagttgagtaagttggatgtatttgtatcagccaattaacttttatattgatatttaaatgagatataacatctacattattttttacatttatgtaaaattctagatatataaaacaagaatttttataaaagctattgttgttattaaggtatactttggtggaacattgtacagtgttctttatcgtatggtcctattcagattatgtaccaaatgcaatactaatatgctctcaagcttcttgaaaaaaatcctatctacatcacgataatatgttggtaatatttttgttccctgtttattttggtatctcaagtagtctcatcttttcttttagaatatacctgatttttaagtcatcttgtaaatatcaataatgtctttctttcttgcaagaaacagaaacccaaacaaaatacaattcaaaattcaaggtgtatttgtgcatactctggattatctactggtagaacccaagaaaaatttaacctacaggccatgggaatgatggggccataggccatctccatagtggtatgctactaagaatgactcattgcacaaattctcattttatgagtctcaggtaaagtattttaggaagtgcatctgtttgttccaagttgaatcaggcctcaatcttggtccagtcagccttgtcctagaggcaaatatcacacaatacaaacatgatatcaaggactctgcttatggattgtttgactggagggtgatagtcgccagagaagggagaaaaattatggactgagtagaacttcccaaatatctcttgtttagtgtgtttcttgttccacattattttgacagaaagaattctgagttatattatttgatcctccaagtttcaaaatccttacaaacaaaaatgtttttaatgccttcacatgtatgtttctttctatcatgttactttgaattatgaatgcatcaatatgtaatgttacagcattaaatgtatcaagtttgcttctccactacattataacacacacacacacacacacaaatgaattcgtattaaactttttgaaatctatgatttaaatagagagataagaagaataatgactggttcattatattacacaacctatgctttgtatatggttttcttttttaaaaatgtactttgtaagttgagaaaaaaggtaattgacaaaataccagtgtaaattttgaacacaataaaataaaattacatcagcccaattacaaagcaacatgtatgaatagcttaaccaactctcctgttttaggtccttacgtgaaccaaaatcctgttgttatttatcacttattggaaccaaaaagagccacagatgttgctttgaagagcaggatgctatgaagtactgttttaaagaccttattaaacacttcactgaaataggaagtcatttatgtagtcattaatacccctcactgcatttaaaccacagttctcaaaggaaaaagctgctcctctctcacagttttgttgttacttacttttaaaaatcaaagatcaatacctttaatgagaacatattgggaatatctatgtgctacgctctaaattaagcattagggcaaaaaaaaaaagatgatttttaaagtcttttcttttgaattttgaattgagatagaaaaccaacgttataggcccataaaagggcctgtaactggagacaagaagggggaaaggctgaaaaatatacctataccaaatttgaagagagcattgatagtcagtaaatatattgcagcaacattatgaaggtttgtgtaagccatgataaaaagcatagaataaaatatttaacataaaaagtagaagaggctcagcaaaaatttccttctattcacctgtcttaaaaagttaagtatttttatcttgtgtttaatgaagaagaatttggaaactaaaagttccaaaaattaataaatttttggctatgcactgttatgtccttttgttaaaaaacactaattgttgagaaaaacctgattgctctatcatctttttatattcaaaccaaatgtgcttgattaaatgttttagatgtcttattaatagacagtcttgatcttggctaaaacatctatagaaaggcttacgcagtgtgctaggtgcatgttgaactccctgtgttgttcaaactagagacataaatgattaatgaatactttatcatatgttatatgtgtattttatatatatatataaaattatagtcatgtactcatctgtaatttcaagttggtagacatttttgtttgcataattttgacagatttgttttgttttgtcttgttttttgagacagtctttctctgtcgcccaggctggagtgcagtggcgcgatcttggctcactgcaacctccgcctcccgggttcacgccattctcctgcctcagcctcctgagtagctgggactacaggcgcccgccaccatgcccagctaattttttgtatttttagtagagatgaggtttcaccatgttagccaggatggtctcaatctcctgaccttgtgatccacccgcctcggcctcccaaagtactgggattacaggtgtgagccaccgcacctggcctcgacagatgttttcataaaattaaataataaaatacaatctacatattaaagttttatatatttctgtaaattgagatatttttattgtcggcactatttttagttaggttgcttaaataaatactaaatatacaatgaaaacgaacatacctagtacagtcattctactcatcacttggtatagttgatgtttttttttttttttctttgagaccaaattttgctctttgtcacccaggctggagtacaatggtgcgatctcagctcactgcaacctccacctcctgggttcaagcaattctcctgcctcagcctcccgagtgcccaccaccacgctcggctaattttttgtatttttagtagagacggggtttcaccatgttggtcaggctggtctcaaactcctgacctcaggtgatccacccacgttggcctcccaaagtgctgggattacaggcgtgagccaccgcatttgaccaagttgatgttttatttgttattaatttcaaaggctgacatgtacttatgatttcagtagttaccagctactctacacgcagcatggtacaattaaatgtatatttagcttttggaacatttctttttaaaagttgtgcacattttaaaaaccaagttatctgaatcacgtgttaaaacatattaaaacaagactgagaattccatttcggacaagatggcataaactgatttttccctgctcctcatagtgaagaagaacaataaaacctagaaacaaaacaagaggccatcaaaagaaaattgtaaaggatagtcagagaaaagcaaactgctttgagagcctcgcgctagaggaaaataaactgcagcacattctcatatgtgcccctatccaacagaagatggggacccccacctgtcattttccaactttcaagcctagtagcagaaggcagcccagctagtttcctctctgaattgaataggagtctctcagacaataccagatgagcctggtataactggcaagggctattgaatgggagcccatctaacattaagcagctagggtaagtgcctctcctttcccagggatttaggactaccatgctctgctgaaaaatagacaagtggcagtattgtttagaggaattttgtcacagcaagtggcccaacctcggaagcctctttgtccctacaggcctaagacactctcactcactctcactcacaacaggaaatacttaggtggctgggtgcaactgccacaagggattttaccactctaagtggcctagtgcaggaagcctctttgttcctgtgggtctgaggctgccctctattgtacagagatactggggcagccacagggtactagaagagggatccctcaagaacaaaatcccatccagaaagcactgtctgttcccaataggcacagagatcttgccacaagtgtcctaactactgaagcctcttcatacctgcagaactgaggctctcttttccgacaggaagacatcgaggtggaaaggcagaaattacaagagacacaatcataataagtgacctggttcagaaagcatctttggtcatatggacctaggacttctcttccccacccagagatacctgggcaaacacagagcactggtaaggctatccaccacaaagagtgactagcctgggaagcccgttggacgctatggccatgagaatccctccacttttacccagagacattggagcagctggagggtaccagtatagggattctaacacaataatcctatctaggaaacacttttatctctatagatctaagaaacccctactctacctagcagcaccagcaccctagtctggggaactccttctgcccactcagaatgtaccatcaaggatttttgagagtaccagcatcactagataaaccaagcaggcctcaataacacgagaaatactctgaaaataaaactgtctttgggaccacagcccataaaagtagaatggcacctgtgtattgaactacgtatggtaaatacctgctaaaataaaagattgaaataagatccagattctgcatatataatggacaaaatgtccagagtaccatcaaaagtcgcctgcatactgagaaccaaaacaaacaaacaaaactagaatgagaaaagacatcgactaatgctatcacttagataaattagatgttgaaattatctgacaagaattttaaagtagaagtcaggccaggcgcagtggctcatgcccgtaatcccagcactttgggagaccccggcgaccggatcacctgaggtcaggagttcaagaccagcctggccaacatagtgaaaccctgtctcgactaaaaatataaaaattagctgggcatgatggtgtgtgcctgtaatcccagctactcaggaggctgaggcatgagggtctcttgaacccgggagagagaggttgcagtgaaccgagatcgcgccactgcactccagcctggaccacagagtgagactccgtctcaaaaaaaaaaaaaaaatgcaatagcatttatgatttctgcaaagaaaatgaaactcttacatataaaactaacaaaacatgcacagaatctgtatgataaaagttaccaagtgctagtaaaataaataaagaagacctaaatatatggagatacattatgttcatggattggaaaactcaccatagtaaagatgtgaattctctctaagttgatctatttttaagacaattcttacgaaaattttagcaatgtttttgaacttacacaggcttattataaaaattatataggatgtatagaatggcacaggacctatactagccaaaactattgaataaggaaaaattaattagagaaatcactcttactgttgttaaagttaattatatagcagcagtattctagacagtctgatactggtggtgtacagactcatatatcagtgaaacagaatagagagcccagaaatagatccacaaatatgcccaatttatttatttttacagcttaaagtataattgatatacaaaaatctgcacatatttaatgtatacaatttgatgagtttggacatattcatatacctgtgaaaccatcaccacaatcaaataacaaacatcaattccctggaaaagtttccttgtgtccctttgttttggacgaagcaggaatccagtaaggagggttagcctttttaataaatggtgttgtagtaatccaacacccataggcaaaaaacaaacaaaaaacaccttgatctaaacatcagaagaacttaaactgtaaaacttactcaaaaatagaacatatttgggatctaacgttaaagtgttcttagacttgacaccaaagtcgccatccataaaaggaaattttgataaagtgaacctcattaaaataaaaaacttttgctatgcaaaatattctgttaagaagaaatataaccgggcgtggtggctcgtgcctgttaataccatcactttgggaagctgaggcaagctggtcgcttacgctcaggagttcgagaccagcctggccaacatgatgaaactctgtctctagtaaaaatacaaaaattagctgggcgtagtggcgcacacctgtagtaccacctacttgggaagctgaggcatgagaatcgcttgagcccaggaggcagaggttgcagtgagtcgagatcataccactgcactctcaaaaaaagaaaaaaatgaaatacgagctacagactgggagaaaatattggcaaaccatatatctagatatcaagaactagtatcaaaactacataaagagctctcaaaactcaacattttaaaaatccaataagaaaatggacaaaagacaggcacagatgtttcaccaatgaagatatacagatggcatatataaatgcattaaaaaatgttcaacatcaacaaccattagtaaaatggaaattaaaaccaaagtgagatattattacctagtagtcaaaatggctaaaataagaaaatagacaccagatgctggcaaggaagcggagaaactgggtaaatcatatattgctggtgggactgttaaatggtatagccacactggaaaatagtttggcagttcattttcaaactaaaaatggacttagcatatgacacagcaattgccctcttaatcattcttaaaaaaatgaaaacttgttttcatacagaaacgtatccacaaatattcatagcagccttatagtaccaaaacacacaaaaaagtcccttgatatgtaattgcttaaaaaaaaaaaaaccctgtggtacatgcataccatggaatattacccagcaataaaaaggaattaactattggataaacctggtgtaatttatactgagtgaaaaaaaataacaatctctgcttaattttgttgttcacccaaaagtcattcaggagcaagttgtttggtttccatgtaattgtgtggttttgagaggtcctcttggtattgatttctatttttattccactgtggtccaagaatttgtttgcttttatttcaattttcgaaatttattgagattcgctttatggctgagcatgtggtttatcttgcagtacattctgtgtgcagatgagaagaatgtatattctgtggttttgggtaaagtagtatgtagatgtctattaggtctagttggtcaagagtcaaatttaatccagaatttctttgttagttttctgcctcagtgatcggtctaacactatcagtaggttgttgaagtcccccattattactgtgtggcttcctaagtgttttcgtaggtcttgaaaagtacttgatttaggacattggtgtgccaatgctgggtgcatatatatttatgatagttaaattttcttgttgaattacaccctttatcattatgtagtgaccttctttgtccttttttactttactgtttgtgggagtgtaaattaggtcggctactgtgaaaagcagtttggagatttctcgaagaactaaaagtaaggactaccatttgacccagcaatctcattactgggtttatacccaaaggaaaatagattattctaccaaaaatcatatgcactgggatgttcattacagcactgttcacaatagcaaagatgtggcatcaacctacatgcccacaatggttgattggctgaagaaaatatggtacatacacatcatgaaatcctatgcagcaataaaaaaagaaaaaaatcatatcctttgcaacaacattgatggagctggaggacattatcctaagcgaattaacacagaaacagaaaaccaagcaccacacgttctcacttataagtgggagctaaacactgagtacacatgaacataaagatgagaacagtagactctggggactacaatcgaggggagggaggaaggggcaaaggctgaaaagctacctattgggtactatgctcactacctgggtgatgacttcagttgtaccccagacttaaatatcacacaatatactcttgtaacaaacctgcatatataccccctggatgtaaaataaaagttgaaatgtaaaaaaggaaaagcaacaatctaaaatgaatgtatattgcatgtttccatttgtttttgcttgcttgtttgtttttgagacaggttctcactcttgcccaggctagagtgcagtggtgcgattgtagctcactgcagccttgaagtcctgggctcaagtaatactcctgcctcagctttctgaatagctgggactacaggcacacaccaccacacctggcccatttttaaaaattgttttgtgtagacagggtctcactatggtgacagaccaggatccctggtctccagcgatcctcccgccttgacttctcgaaatgctgagattacaggtgtgagccactgcatctggtctctatttgtgtaacatttctgaagtaacattattatggcaaatagatgagtggttgcccgcttgtgaactcctccaccttgagggctcagaggctggatccatagatatagcagaatgtgtttgtgtgtgtgtctatgaaaaggagtaggaggctgagggtgggaaaatgccatggaagcaaaatatgattgagcatgactagcttctcttgtgactgttcagcccaaaatgtccaggagtcataaacacgttgtgaaagaaatttccagggcatgcatctcataaggacgtgtctgcttgtgggttctcaggaaactgcagaccctgccctgcaagtctggcctctctcatggacagtcagagggccatgaggttgcattttttaaattgaggtaaaattcacataacataaaagtaaccattttaaagtgtacaattcaatagcatttcgtacattcacgatggtgtgcaaccatcatctctattttggtccaaaatattttcatcaccccaaaggcaccactgtatccatttatcagttagtccacactcctccctcacccagctgttggcaaccacgaaaccactttctgtctctaaggatttgggtgacctggtcttcatgtcaatggaatcatgctgtatgcagccccttgtgactggtttatttcactcagcataatgtgatatggattgggggaaggtggcaggtggcctataaaaggataacatggggtgtcttgaggtgatggtacatctaccacttgtgttgtgcttacgtgaagtgatctatgtggtaaaattgagtataactatatatacacacacacatacacacacaaatgtatacgtacataaatggtgaaatcagaagaaggtttatggattataccaatgtcaattcttttgatattataccgcagttttgcaagatgtaaatattgagtgagcctccgtgaagggtgcacaggaccttcaacctccctatacaattttttgaaacttcctgtgaacttgtagtttatcaaattaaaaagaaaaattcaaacagccttagtttagatctttaaagcctgatcctaatgaaattaaattcattttcatcccatgtatataatattgatgctcaccccaatgattcgtagattacatatttttgacaaagaaagaaatgtaataggttgttactttcttttttacttacaataccagtatcattttgctgaatttaattggggagctctatagaatacaacttgaaaaatactagtctaacttatgtcagatgttcaaattaatgtagcttagtttcgtgctctctggacttttagacttcatgattcaactaaatttaaaacaagttagaaacaaaccagagatcaaccttgagttgccattttcttactttgctaattagggcttctcaccattgtaatataaaagaaaaagaccctatcagcaccaaaacttggaaggacctgatcacagaattaaaaaatgaaataattaaaaaaaaatactccagcctcttcatgtgtttcctgtttcaccatggcctgatgtgaccgtcatcatgcactggaacctgaatttaaacgcatgttaatgaactcctcaaatggcatttaccgaatcagagaaaacttgaaagaaacttaactagcagtggtccatttgagtaaaaatataatacataaaaggaagatctcttgaattccaagcctgacaaaaatttcatctttattagatggaatactatatatcccattttaagaggtatgcatatgtacataaatcggaaatttgcaagtaatatatgtgattttaatgaacttcaaagaaaacaatcatacaattgtatagtcacaccacatatatatgattgtagtgttagtaatagtgttttctgagtgcaaatgatatgtatatgtacgtaaacatacacagagatgcatgcatatatggaatatatgtgtatgcaagtacatgtcatatgctttcccatgggcaaatgattatgccaatattttcccaattttctaggatgttaacactcagtctcttttgctcaattccatatttaattttagtcctgttgaatcattaggatgtctttcatttagtccaagtcttactaatctgagttccatagtccatcacaatcccactttttctttggaacacttcctaaatagcaaattgccaatgttaagctcccttcttctgaccttctctagcattaattacacgtacctcaggtgttgacacataattatggtatgtctcagcttgtcccagaaatgatttttagtgatacatgaacatacgctatatacttttttaaatagaaaaataattgctgacatttaaaacggatctgaacttttgcttagtattaattctattcctcacaaaatcccacattttctgcccatttttcagatgagaaaagccaaagttaaaagggcttaaagttcgtgttaactcagctagtcagtggtagagctgagatttatagccaggttttctctttcccatgtgtgactctccaccagtattcattgctaattttatgagcaaatttgtagaagcatgtattcttttgaatgaatataagaatgacatttactaggctgtaccatacactgattcaatcaaaccaactaatttgcacaaaagcttaagtgaaatctctaagatttcatgcagcctgaattttaaatttggcatgagataggagactgccctttgcttagaaaacaaacagcacaacacgacaaagacataaacttgccccaatgccattgtgcgggagagcataaacctgtggtgagtcaaggctatagaaattaggttctgtggcccatctaatttgttgcccatgtcaggggccagcatgctgtccaggatccagctcattgctggcttcctcgctatgaaggcaatagtcttaggatccttgttataaacgtttggaaaaagtttctgaggccctcaaatcttcctggaggaggcagatatacagatatagcacataccaggaatctcagtcatgggctcctcgatggcagatcccatcagtagtgtttgaaacacacagtttgtacatcataagccccaaattttgatggctagtactaaaaattattttcaaagttgtatttcagtatttacataactattgagaagtgatttcttttgagagactcaaacaacagaaccttattttagctaatgaatttgtacatgcaattccctaattttcatctccctggcagaatggtttctacactccaccttatcctatagactaattacaaattaaccttactaaatattcatttttttctcacttcttcctttgctcacaaatttctagcatgtgccttacatgcatgcattctagttcagactaagactctgacctttcatgccaccttggatcccaccttatttctcaatattctcaacatgaattttctaaatattttcagcttagacctttaaatctatcaagttataattagtgctgacttggtagtggctaatatcactgtaatacataaagtataatgaagaaaatatgtgtttaagaaatatgaacagtagaattctctaggatttaccatcaaactacctgtgtgacctagagctaattatataaatcctgagcttccattttttccagtaatagggagatgacattagatgattcttaacatactctttaatatctttgacaaaaaaaacttcagttatctgattgcttatcctacttgtgtttgttttgtattctcttatgtatgctgggaaatgtgaatccgtatacaatcactgaattatcataatgagattcatctcctggcactggtgctaagattgagaatttttgctattgatggacagagctgtggtattgtgaggcaatatttcttattatattgcttttgttgaagttagtaagtagtataatcctgaaagcaaaataaaatgtggagccaaacaaattgcctctcatatttacagagggcaggccatgcatattacttcacattatgcataactgaggttgtaaaatactgctgtagtgttttgatgattcaacagttagtgttcttcctcaatcaaagagctgatgttaacagaacttgccacaatacagcatatgctaattgcgtatggcttcatgtgggcccttcaaatataaaaagtcaaacttttagaaaccactcaataccagacattcaaaattctgggtggcagtaagggatatcatttgatatttgaagtcaagaaccggattagattagttagagatgcaggaatatttgcaaggtctgtatgacctttacataacatgatctactggaaacctgtttttctaaatgtttatatgtatgcacattgacatttaaaatgaaaacaatgggatgtaaatcctctcattaagatgggtgccactgactgattactattcttgaagcaatgttgtcctttttcttgcatggtaaatgcttcttttttaaaaaataaaaaagtcattgctatgtataaaatgcatcattcagagattataaccagggttggaagtatcatatttgaactttagcttagacaagtccagaacatgttacaacagggtcactgtttgatgttacattgttgttcagagctcaactgtgtgttaggcctggactgaggacacagtgacaccctttattgctgtattgcacagttacatctcagggtaatgcttagaggtgggatatgctaatatagtagtctaaaatgtgcaatcaataattcaataattatttagggagggtcagataccacgctatgtgttggaaatacagtggtaaacaagactatttttaccctcatggtgattaaaatccactgtttttttttaaattattttaggatttgtcaatattccaagggcctaccgcaaggaagagcaagtgactaaagcttgtttctaatctttctctttttattcactatttttacctttcattttgtctcacagacatgatttgacccagtaatgtctcaattctttcccagaacaatgtggagataaccagatcataaacagctccacctctaattacaatctgcgtcattttcttgtgtgtgtgtgttttttttttttttcattttgatgtcattaccatagggaggaatcccacaatggggcaacaatcaccatcagttcctccacaacatgtggtttcaaccatgactcttgagaaagactttagctctatctcagaatattcccaataatttgatttacttaaactttatggtgcaaataatgtaacccatttcacgattctatctgctttattcttctttcgtcctttttgttctttaacatgtgactgaattataaactgccccttgaattcatatcagtcacaaaataaccttgataattacttcactctacatggatttctctataaatacatttcctctctgatcaataccaaccaactcaacatcgtccaagttctccccaaatccaatgaactcttccttctttgaatttagaacacaaattctatctcatgtatatgcatataagatgtcattggaaaaatgggggaaaagatcttaaagggatcagggaggctgggtatggaggctcacgcctgtaatcccagcactttgggagactgaggcaggcggatcacctgaggtcaggagtttgagaccagcctggccaacatggtgaaaccctgtctctactaaaaatacaaaaattagtcaggcgtggtggtgggcacctgtaatcccagctactagggaggctgaggcaggagaatcgcttgaacccaggaggcagaggttgcagtgagctgagattgcattactgcactccagcctgggcaacagagtgagactctgtctcaaaaaaaataaaaatgaaaaagaacacacatttgctttgccactcacatggtcactattcatgttttaacttaaatcattgaatggtcttattgtgttttcttttttttggtttttttttttttggttttttttttgagacagagtctcgctttgtcgcccaggctggagtgtggtggcactatctcggctcaccacaacctccgcctctggggttcaagcaattctcctgcctcagcctcccaagtagctgggattacaggcacccgccacacacccggctaatttttatatttttagtagagacgaggtttcaccatgttggccaggctggtctgaaactcctgacctcaggtgatctgcctgccttggcctcccaaagtgctggaattacaggcatgagccaccgcgcccagccttgtgttttcatatctaatgtttcatcacatggaatgcagtgttcagagtggagattctaggatagacagatagataattgctaacagtgcttaaaaaatattcagcatttgataaatatttgcttttttttttttagttttaggtaaaattaaggatcattaattttttacacctttgatcatgttaacatataaaagattaaataataggcaataagtagcaataaaataggaagtttagtttttccaaaaagtttatgatacttttattatttaaaaagaaatatataaaataatcacttggacactatgaaaatgttggaactgtaacttagcaattagaaatgcattagatacaaatgctatacagttactttatattcaataaatgttcattgatagtaattgctaattttaagatcttcgagaaaatagatacaatattgccacaaataacacctttttaaatacaccttggaatatcagggttataaatagttctttgtttggatgacaaaagtcttttttctttagccacagctgttgataatataaataattcatttttaaagcaataaaaataaatacagccaagattatattcatttatgtttgggggccatatatatagtttatagcataaaaaagcagtgatcttatgttgaccctttctctaaaaattaatagtttattcagcttcctgtgttgaaattgtttttgtttatatactattcccttatattttgcttatatttgctctctttttctgaagaccaattattgaccataaaattagataatcttggaaggtgttaacatttcctagttgaggacgtgtgcaacgggatggattttgctgccgtctagtttcttctcaagtgtctaagctgaggcgttccctactaaaactcaccactgtctggaaatcaaggcacttaactctctgttgtgagggggttgattgtaaatgtcccaaggtattgcaaaagcagaaggacccacgtagagccatgcaaatgagagtgggtagatacattttatgagtgggtgcctcctattctcagccctggtgatttttagggtggtctcaggtgtgtctcagggtagagaggtatagagttgccattctttgtctgatttttttttttccttgtctattgctttaggataaactcagccttactttactcacagctacaattttggctctcaaaagatagtttgggaaaatgttttaaaaatctgactatttattgtttcttgatgttttcaacccttatacaataattttcttttccttgaatacccattgatgatatatgaaaaaaataaggaccagaaggtgaagtgggaattttaaaagtatcaagataaaaacataagcgttatctcactagagacataaacccaaatattgtgttgatcagggtagagtaaagaaagcattgcccctgttaaatcacttatagctacgatccacttggtaatcattataaatctgtgattatatatatatacatatatataagctccatatgattttatttattatgaccttttattttacgtatatattagactctgaagagccccagggtatttgtcccaagatctttgcaaaactccgaatttgcaaacatcactaaggcatataattctactcataaaatgcagtaaagtatggctaattacagagaccccatcagactcttgatgattgtataaacttaagtcatatataacactattaaaataaaatctactactaaacaaaccacattgtattatatcaccccaattaaatttttaactatgaacttgcctcaatctgaaaataattgtagtgagcgaataatgatacttgctgtgtaataggtgcctggcatgttttctttaaagtaggacacttttatttttaatttcaacttttattttacatacagggagtacacatgcagatttgttaaaacggtatattgcacccagatagtaagcatagtacccaataggtagcttttaactccttccccgccggtccctccccactctagtagtccacagtgtctgttgttctcatgtttatgtccgttgtgctcaatgtttagttcccatttataagtgagagcatgtggcatttggttttctgttcttgcattacttcgcttaatataatgtcctccagctccatccatgtcgctgcaaaggacatgattttgttcttttttatggctgcataggattccgtggtgtgtatgtactacattttctttatccagtcaaccattgatgagcttttaggttgattcgatatttttgctattgtgaattgtgtgacaaagaacataccagtgcatgtgtctttttgataaaatgatctattttcctttgggtatatactcagtaatgggattgctgaattgaatgatagatctgttttaagttctgtgagaaatctccaaactgcttgccacgggggctgaaataatttacattccaaccaacagtgtataagcactcccttttatctacagcctcaccagcgtttatcttttgattttttttttttttttttttttgtcacccaggctggagtgcaatggggcaatcctggctcactgcacctcaacctcctgggttcaaatgattctcatgctgcagcctccctagcagctgggattacagatgtgtaccaccacacccagctaatttttgtatttttactagagtcggggtttcaccattttggccagtctggtcttgaactcctggcctcatatgatcctcctgcctaagcctcctacagtgctgggattacaggcgcaagccactgcactcagcctttcttgacttttaaataatagccattctgtttggtgtgagatggtatctcattgtggttttgcttttcatttctctgatgattaatgatgatgagcatttcttcgtatgtttgttggtcgcttgcatgtcttcctttgagaagtgtttgttcatgtcttttgtccattttttaatattagacttttgtcaggtgcacagtttgtgaatattttctcccattctgtagattatctgtttactttgttgatagtttctttggctgtgcagaagctctttagtttaattaggtccctcttgtcaatttttatttttgttacaattacttttggggacttagccaaaaattctttgccggccgggcgcagtgcctcatgcctgtaatcccagcactttgggagaccaaggtgggtggattacccgaagccaggagttcgaaagcagcctgaccaacgtggcaaaaccctgtctctaccaaaaatacaaaaattagccgggtgtggtggcagacgcctgtaatcccagctacttgggaggctgaggcaggagaactgtttgaccccaggaggcagaggttgcaatgagtccagatcacaccactgtactccagcctgggcgacagagtgagactctgtcaaaaaaaaaaaaaaaattgccaatgccaatgtcaagaaggacatttcctaggtttgtttctaggatttgtagttttaggtcttacattaatatctttaatccaccatgagtttatttttgtatatggcaaaaggtagggatcaagtttcattcttctgcatatggctagccagtgatcctggcatcatttattgaataggaagtccttttaccattgcttgtttttgccagccttgtcgaaggctggttgaaggtgtatggctttatttctgtgttttctattctgttccattggtctatatgtctgtttctgtaccaatattatgctgtattggctactgtagtcttgtagcatagttggaagttctatagtgtgatgtactgtggtgtgaattattgtagggtgaagtactgtagtgtgatgcctccaattttgttcttgctgcttaggatggcttcggctatatgcgctcttttatttttttttttggttgcatatgaattttagaattgttttttctaattctgtgaggaatgaccttggtagtttgataaggacagcattgaatctataagttgttttgtgcagtatagccattttaattatattgtttcttccaatgagcatggaatgctttttcgtttatctgtgtttctttcaacaatgttttttaatactccttacagagatctttcagcatcttggttaggtgtattcctaggtatttcattttctttggctattgtaaatgggattgtgttcttcatttgactctcagcttggtcattattgttgtatagaaatgctattaatttttatatgttttactataaaaatatatttttatgtattgtatatcttgaaacctcgttaaaattgtttatcagttctagtagccttttggtggagtctttgggttttctaagtatagaatcataccgtcagtgaaaaaagatagtttgacttctttttctatttggatgcattttatttctttctcttgcctaattgctgtggctaggacttccagtactatgtttaataaaactggtgagagtgggcatccttgttttgttccagttctcagtgggaatcgttccaacttttgcccattcggtatgatgttggctatggatttgtcatagatggttcttattattttgaggtatgttccttcagtgcctagtctgttgagggtttttatcatgaagggatgttggattttattgaaaacttttttctgcattaaaataggacactttctgtctatgcttagcgtcttgtttattcttatctactttttacttgatgagatgtttcttcgcaattaaaaatatttaagtgacagtatagccacccatactttttattacagaaataaaaaatgcttcgtctctcatctgtcatttgatgaaaaaatccaagactttcttctaaaacctgcaaacatcataattcatatttgtattgcctccaactatcttctttcaagttaaccaccctttcaactttcactaaatctttaactcctatttgacgaggtattgaacgctgtactcaatgaaacacttttgcagcttctcttttggttatttatttttctttggttttctatagagaacataatggggttgaataattcaaaaatacaaactcttgctgatttcaacattgcacttttaattatattaaacttgtacttcctgggtcaaaaatcatctacgttgtaagactctttactttttctacctttttattgccagccttgtcagctatctttagggtagaagaagtgggagagatggtaaagcaatgagttgtgatttatttttctcaaaagaggaaagtttgcttcaaatcaaggaaatcaatacctacataaaaataaggggaggccaaggctgatttaataaagagaaagctagagtttcatcttgaatctctcactagcatagcgacttatgtatgaacctcagtaaatatcaatattctagacatagtggggcttcggtgtttctcaggaatagtcagacacatcagtatttaatctataatttaataaatccaagggtcttcttatctggaataaagctgactaaataatttagttgcttataaagcactaatatttagtactaaaatgacctgtcaatgttatttacatttattttatgttaactgaaagctatgttgctgataaagcttatattaagttcaggagttttaacgtggaattctattaatatggactcttaggactcaaagtgtttttcattaaatatcctggaacgtatgatataaaaattgagagatttatctttacgtattttgttctgcccatattggtattttcagcttattttctatcacagatttacatgggccaagactgaatcatagaatgggatattggaatttaatatagtttgttgatgctatggaatcattttttaaattatcaataacttattggatcttttattgccaaagtttcctaggatttcaattgaaatgcaaaaagaagaagtaaaagacattaacgtaaattctcagcagtttatacaaataaatttacaaggggcctatggaacaatacatgttggttttattttcaattgtagcaaaaaaataaataaataaaaggtagtttgccaacctctagagtgttgtaataatggcatcttttgacttttggagatttcatggaaattcttcaggtttccaacaagagccctccgggtgtgttgaattcatctgtacctgtgacagtcaggatctaggcaaaattcagaaaaacagtgagtacactaaatatagacttgccaagtctacagttctttagggaaaaaaaaattcctggactcagcctaaagtccccctaagttttagaggtcagtaatatttcaagtgactagaaaatctgaactaggtacatcatctttgttctcacacttagtatgattgttctcaccaagcatcattgcttttctcctttctgcataatttttccttactccttgattgccctttcactcttatgtgaccataaacctctgagtttccataatgtagacatgaaatttaatggactacattatgaaaatatttttttcaatgtcatcataatttctgtgccaggataacaagctcagaatatgggagtttatagtccagcatctctcccacaacctactatgactgtaaagaaattgtaacctgctccttatttccttcaatgctaatttctttgaaaattgattatgaatgccctccaatcaatatatgtaaaaaaaaaacctttatctttactaaaatacatatcctccagattcataacgaaggagaaaattctttggggaaagaagagtggagacccctcagtttcaattctgatccaactgactttattttgtccctagggttattttgctggttggtggcttaacattctaatcctagggtaaactaggacctgccttgccccttaacaacatgtgtaatcttaaatctggcccagtcaaaagttttaaacaagactttaggcggtaaaaactgaaagagaaataaaccaggaattaacaatgaactgataatttttgctgatgaactaccacttggcttacagagattagaacacatctttctaatcttatgacacaccaccctaggctgagagtcattctagcaccatcttcgtcacctactcccttgaaaggtacatgaagttttatttcctttcaaaattttatttttttatttttggtttcttgtttttagaattattatctggcaaggataggactttatccatggactcgacagtgcatttattttagaaaaggcgtgtatatttgtgcaatttatcctagcagagtaagttccaatatgtatatacaggccaaacaatgactataatatgtacatttttcttcattaactgtgttgattgcctgtgttctttcatccagcagaggcaaagtactaacatagaagactatccaaagtcttccagtagacttgtttagactagatttgaaagaagatcttaagtgtaagattatttttatactgttttcaacttgtatatttgtgcaatttgttgaacaaatgagaattagataaataattttaaaatataagtactttatgagtcagtttcccttttttgtaagttctgtttcccagacgtgcaaagcaatataattcttattatttcagggtataaattaaatttaacctgagcaaacaacttcttgtatgattgtattactatttttattactattatttttagagagactgatgacattctatcacttggtgtcatattcatctttttatagatatttgactaataatatgtaataatagtattatgaatggtgcccttaagtctgatgatttgcttaaggggctaaagaacaatatataaatggaaatctaaatagcactacttttaaaaagaataaacccatagaaagaaaattccatagctcaaaactaagaaactcaaaatccatataacacagaaagtaaaagggagcagttttctatatatatatatatatattttttaaaaagctctctgactctggttaaggatgcttgtgaatctaaaatgatgcatgttgataaagcactgtaatttaaagaagtctccagtcttgcctttaacagcaaaagcaagaacacattaaatatataggatctataagagaaatgaataaaaaatgttcaaatggaaatggtaaacatacagactagttcttaaagataggtcatgtatattcattttctaatttaaattgagctattttgatacatgtatatattttattattatgaaatatgtcaaacaactggaggatgactaaaaataatattaatataacattttgccgtacttgattttagaatggtggtaccaatttatgcctccaacagtagtgtatgcatcccccatttttcaaattcttatcaactagatattgacactttataatttttatcaatttgatgagtatgaaattatatctcatttgttttttgatcaatgtatcttttatattcattgaccctttattatttcctgctctgaatcatctgttcatgtcctttgccaatttttcaattgacttttggtctatttcttattttcatgtaattctttaggtattacagtttttccctttcactcatcggtctctaaataaacttggaaataatttttaggggtttttttgtgaatagtgaataattttgtgaattattttagagtaaataactgtcctaccatcattgtttaaatgtctaccttttctctattcacctgtagtgtcacctctgttttgcatcgagattagtatatacatgtacattagattagtatgtacattagtatttctgggcatctttttttgttctgttcttcatttgccaattcctgtgccagtactataatatgtctcaattaccatagatttatatttagccctgacatgtggtagggccagacaccctaacttgtttttcttcaaaactttcttagataaaccttgccctttgtctatcatcagttctataaaattatcagccattatctttaaatctggcttctctgcaattccattcattctcttctttaggaactcttattgtcgtataatattgtccatcttttatgtccttagtattttatttttaacatttacttgcctccctgtgttacgttctggatgaattcttcattagtatcttctaattcactaattttatcttcttgttcaatccagatacttaagctgtttatttctttaaaattgattcatttactacatttttcatttccaacatttatagcttttttcttctcaatatgaaattattttaatttctacatgcttttgttttataactacttgttctttttattgagttttatcttttaattttattgttgagaattctaaacatattatttaaaaatgttcttcagacatctatatgagaataatttcatctagactgaactcatggttgaatcattgtggttgtggtggtggtggtggtggtggtggtggtggttttctgccttttttaggcctttatttattcacagatttctggagcatttagagtaaaagggtttgcttttattgtcattgtgtttattatatctgttccaccactttgctgttgtccccatctggcccctggaatagctgcctagattcagatagtctactaccacgtggagtgctgtttgtggtgataattaattagaaatattgaagattcagtactcaaattcatttgttttgggctgcttctgccttcatggcgtgtgtgtgtgtgtgtgtgtgtgtgtgtgtgtgtgtgtgttcttcccgtatctctagtgtaacagattcctaacataataggctctcaggcagcaggtcagcaaaatttttaagacatttttcttttcaagaatgattgctgggtgaacttttgccataacttgtgacttcaagcagtgatcttaattctagtttatcctgtacatgtggactcttagtgaaggaatctaaatgcgaagccactacccatggggggaaaatagtctgtcaggactgcagctactgtgtctgatatgtggaggtgccaagattgtgtctaagtcctactgtgttataacactctttctttttttatattttctttcttattcttctatatattaaataagtgtcaagtcatgaaatttccatgccatcttaactgaagaggtttaaatgttttatatttaatctcccgttatttattgactttacaatgtcaaattaaaactcacattcaggcatatactactaaaatactaatagaagacaaactaggatcattatgtttagggaaaaatacacacatactatcatgacacagtacaattaacataaaaccaaacaccagaggtttctcttattaaagctgaattttaattgtttttatgtatctatattactgtctataatacaggttcttgagaattaggactgctgttgtgtgtgtaagtgtggatcgcttttgttgtaatttttgatcatacttctggaaactagcatgatagctggaaaacaggtccacaaatattaattgaatcaatgactgtttaggagacacacaggcatagatgcagcttctgtactacagtaccttacaacctatcatcgacaaaatacaaaggcaataagtactttttaaaaatatataattgtataaagtgatgagcaagaaaacagaatgaataagaatgtgtaatagtaaattaatcccatttcacttttgataggcttttatataaagctgatacaaaatactttttaaattctcagtgaggcatttgatgagtttcctaataatatttatgtaaatataatagcaagtatacaatcttctctatattttgtaacagtaatgactatccctttaaaaggtatctatttgattcagaggttattatttttctcttgtcttcgctaattttaattctctgatgatgttttgagaacacatcacttgaagatttttagtagggcagtgctgttgtctatgttactgaaaagtaactggactggagaatgtgaacatgcactcctgttcagtatttggattttaggagtgtgtcgctgattcttgaagaatttttttaaaatctttttaagaaagcatcattattgttacttaaaaatatttacctgttaagcacctcttagaatggccaaaatccaaaacactgacaacatcaaatgctgaccaggttatgtaacaacaaaatctctttcattgctggtgggaatgcaaaagggtacagcctctttggaaaacaatttggcagtttctcacaaaactaaacacacacttatcatatgatctagcaattgtactccttggtatttacccagataagcttaaaacatatccacacaaaaacctgagtgcaaatatttataattattcataattgaccaaacttgtaaacaatcaagctctccttccataggtgagtgaatgaatgaatgaacaggtacatgcagccaatagaatattattcaggacctttgaaatgagctataaagccatgaaaaaagaccaacaaatatgggggaactgtaagtgcatattactaagtgaaagaagctaatttgaaagggttacatactgttgaatttcgactatgtggcattctagaaatggcaaaactatgatcacagtaaacagatgagtggtttcagtggttgccaggggttgcggcaggaggtggaatgtatagacagattacagaagatctttaaggcagtgattatatattatccgaaatgcttgcgaccagaagtgtttcagatttcctttttttttttggggggggggggcgattttgaaatatttacattacacttaccagttgagcatcccaaatctgaaaatttgaaatccaaaatgctccaatgagcatttgctttggacatcttatcagcacttcaaaagttttgaattttggagcatttgaattttagatttttagatttgagatgttcaacctgtatgattctatagtggtggacacatcgttgaatacttgcccaaacctatagcatgtacaacactgagtgaaacctaatgtaatctatggactttggctgacattgtatcaatgtaggctcatcaattgtaacataccattgtggtatgaagttttgatggtgggggaagctgtatgttcgtagggctagatggtatatgagaaacctctcttccttccacttagtcctgctgtgaacgtaaaactcctctaaaaaacaaagtctatttttaaaaaaacatttactaggacaaaacatgtttttagcacaattttttaaacgcacagtaaagcgccatatgctcatgagcttcctttggaagcgcccatcttcaaacaagtatattaagataagttttgtccatatcatagcaggtattttattttcccattctgcatatatttaacatggtaattaattcagcctggtattactctggctgttattcaaagcctcatatatgtttgctaatttgtcacttgctcctcatacaacatcttaactatttaataagcagttaccaaagtctagacagtcctgctccagcatgagttttaattgagtatgtactacataagacaattaagatccgaacaaaccatcagcggcagatgatcctacagttatgaggaaagcttctgtaggagtgactgtgtaaaatgatgaaagcaaagggtcttggaatatcatatatatttatatcagggctctaaagacatactaggataaagtggagaaaggcatctctagggctatcttctgtcattttgttgccagtcgttttaccatcaaagcaatatttttagaaaaaggtttccatcatcatttaccaatattttagggaatctttaaagtctaagaacaaatcagaaggtaataataatattgaaaaattattccaaaatgtttagtacgttgtttgtcttgtttcatcaaaactatttgtagtagcagaacttttgttggtggttctgtaactgatgattagctttcagtgcaagtatttttcaggtaactgtgtgaaaatatttttaaacatttacactatgtttccaaaccggaacactttggtatagttatacctgtgaaataaatgacattgtgtaaaacaatatagcggatcttttaaagtgagttgacaggatgacagtacagttactcacagttcaaactaccacaatatagaatgtaatgagccataatgctattatttttcacttcagaattttaatattgtgttttgtacagttcttaaaatgtcatgcataaaacattgtgctgaaacaatagtgatttgtatatttattacgtcagtaggacccaacagtctaataacgataggaaacaatggaaatttttcctcagacttttttggaaactggttacacaaagaattgctttgggaaggatctaatgtttgaaaagcattctggcttgatctttagatacaacagtttgatcttttgtgcaactgagagcctctatataaatgcagctggagtgagtagggtatttgaggctatggcaccttcagtgatagggtgatttttgtcttactcatcctcagtgccaaccagaaaataattacattcctctaatagtgaattgaccactaactaaatctgaaggacaagaagcttggaaaaatataactgtgcaaaatggcttatcgaacttaccattttatagaagttgaacatggatctctaataccttggacttgcttctaatatggtatcacatagtttcatcaccgtgattactaatggatggagtgatatattttatttccaagtattaataaaacagcaaattatcataattgaataagaaggatgctacattgcatatttaataacgtatatgtgacactggacaagtaaggatgaattaatctcttggaataaaccaccattgaaagagcgtttctgtcaagtaatgtcatttactctccttattaacaaacagagcaattctgttggatcacttagcatggtgagcttattaggaaaatcacattggtttcagcaaaagactcatgtgacctttctaaatgaaaatagcatgatgctaaaaaaaattggagggaggaccatctctacatacagaatggtctttgcaatcaactaccatattgagaaaaaacttttattttttatgtttagaatatagaagggtttctgtttctcttttaattaaaaggaacgaaagtggtatttacattaaatgcaaatagcaccttctttcctacagtgagtgtttctcagaaatggacacattttcccttctcggtctccagaaaccccttgatcacaccaaaagagcaagtatggctttctgaaaatagaaaaattgtaggtaggttatacttacagtccctgaatttttgcacatatcgtaaaatggtgactagaattgttcaagatgtgttactccgttacacgtttacaaaggggctgaagagatatagatgttgcattttattaatactaaagaagaaactcagttataggaagtaacaggaaaaatgaatagtggtctgcatagtaacaatatcataatactgtaaagaagaaacattgcacttgccatttaataattgagaaaatctagagtgaattattttgagtaagatacacttactattaattttttctaaaatgtatttctctaactacatgttagttcaggtgaaacaaaaaatgagaatttaataaatgtttatatctgaaatataaaattaatatgtaaatataccttcttttgagatgacaggtgtacattctcggttgaaaagtaggtttctattttaaatcaagattaatgtatagtttatgattaatttaaaatataaatgttatatttcctctcatcctagaacagaataaaaagattttgaaggatttgtattaatcaaataagctagaagccacgcttttctaggaaaaatattaagagaaatgtaaccatgcttgacgctaggatggtgttaccatcaaactaaagcataatttcctctttctgtgactgttgaatactaatttttaaacattaggaattgtctattatactttattatatcatgactactcaatgttttgacatgaaattgtccctaatatatttgctaatatttgaaactagttcaaaattatctggcaagaaatttgtggctttatccatatgatgtatagcatgctagcttgtctatgcagaaggacaataattagacaattcagagaaggtgataatatttatagcttattatagaaatatatgtaaagactttcttgattgtaaacataaatattataaagtataactgagcttttgagattatcaggaaaccaaagtatctacaaaatctaaactttcactcaaacccatggtcagactgtcaatactaaattgaaaaattagactcctacacaagttgtgaagtttttctttcttcatgcatatgattacagaaaggcaggtatggatggcctaatttgtggaataaatccaaccacttttgtaacagctcagataacaaaaatcactaatagagaatgtgatattttatcaaattggctttgtttttgtttttattgtagcattgcataagatcaaagaagaaaataaatgattcaattaaaggaaaaatactgaaaggcaggacacagaaaaagagagttttagatgtggaattcttttgagagatcatctagtctgtttacagatatgaaatctggggaaacacagaggtgaattgtccaaggctttgcagttattgaagcatcaaaatcatacatatatcctgcttctaaacctccctctcagtgttcttttcatctatggttttaaaataatcaagtggtatttgttaagaagttagaattttaagatatggattatataaatccgatttatatggtcaagtttgactaatattagtaaatttgattgttagcaacataaacatttctggagtacctttcctataaaatacggatgacaatctcctttagcattgttattccgtctgggataaaaagcacttcccacatttatttagaaatgtaatggatgtgttcatttaactccaatgatataataattctctattgactacattcagtataacagtgatgtttatttggaattccccttggacttccacttagatttgttaaatatgaggtgatttgaatgacttaactaatgacatttgctcaatgtcttaagtttttcttgatagttggtaaatatctgttcatgatcaagagtgttacaccaagaatttactttcaatagagtgccatagatatcacttactgtgcattctctgtgtttatgtgtaaacatataatagatattcaaaagtaatataacctctccacattataaaataatgcacaaatataaagaaggataatatataagaaaataaaatggtgtaattgcacacgtgaggtgttctattttatgtcaaactatttcttaaaatcattcaaatatcttttaggttactaaaggagcttttgtcatatgaaaatcatatgaatagaccatcacattttgcaataagaagaaaaaaaaatttaactcatgaaatcaaaacctttatccaaaaccacctttgttcctcaatcttgtccaaattttgggtttttctaaacaagttttaataactcttattattttatatatttaccaaagcaatcagtctgtataagatttacattttagcatgctgttttttctctgatttatttctttcgaatcatcacatcaaataataaatcttaaagttgtcaattaaaattgatttcaaatgttttgtatctccccactattataagaactatattgtgaagtctatatcaaaatatagggggaaaagcctaaggtcgcaagtgaaaattttttttctaagacacattcaaaaatttgctaaccatttttgcatatctctaatttgccccagaccccaaattttaggataatgataaacttttagaatttgttaatacaatttttataattgaatatatcatatcttttttcaagtctatgttttttaataaacctgagagcaaatatttaaaatctcttttaaaagcatccaaatcgtaacaaaaagaactgtacagtgtaaacaatagtgtatgctccagacaaacaaagccttgtgatgtgaaataaagcaaatttgtgtataattaagcattaccagtactgttaaaatataggtttataaactggcaagaatatcgggaacatattctcagatattcaaatgcaaaaatggaaaatatttcatttttaacggtgaaattttctgctaactgtttacaaaataatatgtacttatatatagaaatgagtataagctattttcttttaatggctagtttctcattaaagggatcatgacattaggcatattaagagtttagtttggaaactattttaaaatattaataaagagctattgctaattaatgatgggattttccagttttatacatgaataaattactattaaaataacaaaaattgataactaagaatggggattagagtttgaaaaatttcattagtatttatggatttattggtttccctcattagagactagatgaccatcagagacggtgatatttttacttcataaccgcttatacctgttgtaaaatatcgagaggccatcagaattttgtcacttagagaagggactggaaatttttttaggtattcttttgccaagcatacttgctctatttaatggatgagaagtaaagctagacagattttcttcagttaaactttcaatatctccacagtctacagtacattaaaattcactcattgaaatttttttgtttgactctataatgataaatgtatctatttttagcattaataaaatggatgaagctttaactctataataaattcttccactttaaattctatacagcttgtctttccctgattctctagttctattaaattagtagaagtagttcgtgtcttcataatcaattgttatcaagaactaatatgtctaaataaacctgtagataaatgtccattcattattcttggtccataccaaagttccaattattatttgcagtatgtacctgacatatacatactaaaatgggttcaagtatagtttctcaataggaggtggatccttttattgatacataatagttgtacatattttgaggtcacataagattttgctgtgtttatgtaatgtataatgatcaaatcaggataattgggatactcatcacctcaaacccttaggagatggatactctcttgatgttcgatatttttagttttactttgattttatttttgtcatggcctcatttcaaactgactcataatccagaattatccaactaaatcataacagaaagtattattggctaaagtgaatcaagaaaaaatttagcattgttgctgtcatatacaaacatgtaagaagtttctttcacattttaaatataaatataaatgactgattctgggtttttcccttatgaggaaatacctaagcaacattaagctaagcaaataaatggttatttgtgtgatgatcttctaaatgtgtgtgtatgtatatattgctttaataaaaatttcagatggtatatcattttttaagtagcgaaattatcatagtgacttgtgaatagcaaaatgcaaaccaatgtggcattggatcctctccaggatgtgatgagtcacctgtcaccccccccattcaaccccaaatcccctacattctcagggaggactagttcttcctaaggctaacatgaatgccacatgttttaaagcaaagaatgtagaacatcaagttttaaatgtcatgtccattaatgagattagttaactgtccctttgcaagttcaaggaacaaagaaagccctgtggagagcagagagaagacagataggtggctgttaatgataagaggcaaaatttggtaaagggaaggcaacttaagctaaaggaagtgagtgaggtggatagaccccactaaaagacaaaaggagatagtacttaagaaaaaaatctgtcagtatctctctctggtagctgccttgtttttgttttgttttatttttgtttgttttatgctttcctgtaaatcatctcaaaatatctgactgtagcttcctctttcactcatttcattctgtaaattgtttctcaataccatgcctcttgaacacgagaaaacgctgtttctagcttcatcttcaagatatttatttccatttgtaaaaagaaagctgaaacatttttataggctacctcagagattatatactaacattttagtaacatgttctaaatgcttgagtagtttaagtattgacataaaattgctttctatttcagttggaattgtttgaatcctcagtaaatgtaaactattgtagctctaagggtatccccaactagaaagttcttatttcacacattaacatttgctgctttcttcacaagttaaactaaacatattttccttatttatttatttcactggaattcctttaagacattattttctcaagatgtggcccacaagccacctgcactgccaaccacaggttttctcagttggtatctctggggagaagaatcccttgatagtataaaaaatatccaatataccattatattaaaaaactagattggtcatatatctactgcatataacactgatggtcatatatctattgcatgtaacactatatacctgaataccagataaatgtagctcgggaaaaaaggtgaattatttcatgtagcaaggagtgcagaggtagcttttctgtcattggtttaggcatctcaatttcactccattccaggcagtccctggcagaaaaagaacaggatcaacatgattagcctggccaatcatgatttgttctttgggatgagtacattgcttgtgcacagtctcccttgatacccgaatggaattggagttctgttgacaaagaggaggaaactggatgggcaggtctagagtttatctggaatttgaattgtgcatttttagacatagagaaagaaatgcatttttagacatagacaaagaaataagtaggttttattatagtacgcactaacttaggtcagtttctatgtttctgtgactttcttaatcttacataattacctttatcttattaattaattaatttttatttttgctacatgaataaatacattcaagagggcacacaataaaatatagtaatatataattccaaagtacgggctcagcaagtagaaaaaataaacaccatgatttgaaagcattgatgtaaaacttgatctttaccattgctaattagtcagccagaaaatatatataggaaatggcttagccctacatataaaatgtgattctcattcttagggttatctatgcatcttttatctggtactactttttatatctcaatatttgacatcttttttgccccatttcaaaatataaatttatttattttctttacaactgcattcctctgcacaaataaaaaatatataatttagaatatatagtagagttttgataattatatttatattttaaatggttttgatatgaatagttacttctattctccacctgtttaacaaatttgatatttggaggcaaatttccatatatttgaataaatatgatagttaagaaagcattactttctatttgccaaaacttaccttgaattaaaaatagacaatacgtatttatatatgtgtttgtatatatgtatatatgtttgtgatttgtaatggttttgtatatgtgtgtcttctaatacaagggtccccaacccctgggccaaggaccggtactggtctgtggcctgttaggaacccagctgcacagcaggaggtgagcagaaggtgagcaaacattactgcctgagctctgcctcctgtcatatcagtggcagcattagattctcataggagagccaaccctactgtgaactgcgcatgtgagggaaataagttgcaggctccttatatgaatctaatgcctaatgagctgaggtggaacagtttcaaccccaaaccacaacccctatacccccagattttcacctcccccaaacccctgtctgtggaataattgtcttccacaaaactgttccctagtgccaaaaaggttggggaccactgttctaatacacacatacacacacatacatacatacaagtgtacattgatatatatatatatatatatatatataatgaatagtttactactatgtgggctattatacagaactgaaaaaagaaccacaacaacacaaaacaatatcgatgaatgttagcagtataatatccaaagaaaaaaataaatccaacattataattcaaaaaacccaatattaaatccaataaatttaataaaaatgtcagatggtgcattctctgagtacagtatcccttgatacctgaatggaacatactacatggtaaatatcatctccataaagccaaacatattgaaaataaaattttagtctttaggaataatatgtgtgtgtttaataaacatataaaaagaaaagaaatgatgaagaaattattcaaaactgtgttacttcatttggggagaggtagggaatgtttgcaaaagtgcaacatgattggacataggttattttcaattccttgcatttttgcaggagtaaggagtgtttgcagctgtttcctacgttgttaaaaatgggcaggccaagagtgcaatgtatctttaacataatgtcgtaagtaatatcccaatcaaatcaaatttatgtaagtatgtcttatgaagtaaatgcaataatgatatggggagcataaatgctacataatttgaatttaaatgagagcaattggccaggcatggtggctcatgcctgtaataccagcactttgggaggccaaggtgggcagatcacctaaggtcaggagttcgagaccagcctggccaacgtggtgaaacccggtctctactgaaaatacaaaaattagccaggtgtggtggcagatgcctgtcatcccagctactagggaggctgaggcaggagaatggcttgaacccaggaggtggaggtcgcaatgagccgagattgtgccattgcactccagcctgggcaacaagagcaaaactccatctcaaaaataaataaataaaaataaataaatttgagcgataataaagggtggttatttgggctttgtatggaaagttacttattttcatacagctttctatacatacaaatttctgtcaataacaagattgaagaaacatagagtaataaatacaaccctctgcattctgcaattttcctaattcaaagttacattttcacatgctgaattgcatttattggctttatgtttaatactaagcttggcacatactatataccaaaaataattttaattttcaaattgttgattttttaagttgttgccaatgatttatctaatttgctcatgattctggatcaatcatttctgggttgtttcagcaaatcgttaagaacatatctaaattagagttatatattattatgtatagctgtatcatttactgaggaattactaacaatacttttcattttctagataaaattcaattgataggataattttctcttcctctggtaattatgccataaataagcatacttctaacatttattcctgtgaaagatggagagtattttttaataactacattcatgaatgtcactttctaattttcagagtttctggtctgtaaaaaaatgacaattagttttactaaaaataaaatgtgagaataaaaatgggtgaaaaaataaaatagagcacacaacatactcctatctgtgaaacttgtttttaaaacaaaaataaaataatgataatttcctcatagaaaaaaatggaaaattaggatttttaggtgaaaaattaaaagttaattttcttagaaaatattatttattctcgcggccaggcgcagtggctcacgcctgtaatcccagcactttgggaggctgaggtgggcggatcatgaggtcaggagatcgagaccatcctggctaacacggtgaaaccacgtctatactaaaaatacaaaaaattagtcaggcgtggtggcgggtgcctgtagtcgcagctactggggaggctgaggcaggagaatggtgtgaacccgggaggcggagcttacagtgagctgagatcgcgccaccgcactccagcctgggccacagagcgaggctccatctcaaaaaaataaataagtaaataaataaataaatacaataaaatattatttattctccattatgagcatgagtcttacagtatggcaatcacttgtatttatacagaatggacataaaaatgaatattttgaataaccaacttaatttgagagtaaattttgatataacttgtcatagttatgtaaattattttagggtagttgataattgtgttctatgaattaaattcaactatcatgcaacccagtcttaatttaccaacataaaaatgcttatagcatttgttagttaataaatatacttcatttgcatctacagctgtgcataaaatcactattcaggatgagtcacatatatttttaaatatctatcacaagtagttagtgcaaataacttaaaacaaaatatattttctgaattagagtctatgagaaattttagccacattaagtagaccaatttgggattaaataacaataacaacaatgataataataatttatccattgaatgatatttacaattggttttatagtagaacaactataagatacaattttcaatacacttctcattcttctaaacatatggagtacagaagttaaatatattctaggaattgtactaacagagtattttatatttcaatctcaaaaattaaaaatatttccccaaagctaaatatgataaattttcaataggcaaattgaatgaacatgtatttgctactaaattttaagaatataagaaacaaaatatataagaaaattcaggttatctgttacattgtaatgcttgtaatggatgtgacggataggattttggttagtttatcaacccctggctgtcttacttaaaggactgattcggaatataaaagtttaactacatgtgatgtgacttgagtattgctcccaagctacctttaactggactcaaggaagaagaaaccatattcaactaaaattgataaaagttcattttcaatgtagaataattcatttatcattcagtgttcttgaagcagtttaaggctttgtttaagtactaaaacagagtttgaagaccgagataattggccgggcatggtggctcatgcccgtaatgccagcactttgggaagctgaggtgggcagatcatgaggtcaggagttcgagaccagcctgacaagcatggtgaagccccgtctctactaaaactacaaaaattagctgggggtggtggtgtgcgcctgtaatcccagctattcaggaggctgaggcaggagagtctcttgaacccggaaggtggacgttgcagtgagctgaggtcgcgccaccacactccagcctgggcaacagagcgagattccatctcaaaaaaacaaaacaaaacaaacaaacaagcaaaaaaaaccaaaaatgaaataatttctctaatttcatttaatgcctgagagaatgattcttatgtataaatttttaaatggctacttatagacattgatacaattatactttattctgttcatcagtgtcctaaattgtcaagtaacagaattcactatctctagggtaaacagtaagggccacactaaagataatatcaaagactcttggggagcagaagaattagaaatggtggcaaagagctaggagcaacattagaaacacaacacagccaggaaggcaacgatatcactggaactgtataaatgaaacaactctgttgccactgttagcttgttgaccctgatgatgctgaggactagatggcagaatggtcaccacagcaaccccagggaggcccaggtgtgttctgcactggccagattagactaaatgctcactgcctcaggctgtttagtactgtatcttaatatcacatcaggacatttgatcagtgaaacaagtttctcagatattccaccttgaaaaagcaggattcataattgagcatctatcaaatgtaatgtacgtatttaaaaacgattaggtcacaaccaatggggatatgtactacatttcattaacatatattgaatactagttcaaatacttctaacattaattcctagagtattaatgtaacatgtcagtatggaaaaaaattccttcatgaaccctgaaattaaagagtctacagtttcagttttgtagtgttcctagttacagaagctagatttttatttttttacaggaaaatacattaggttttgggtacaacatagatcatattgttattcagttttcattctgttcttaatggattacaaaaatatgttcagtttagcaaatttttctttaaaaatgtggaatcatgcaaaactcatcaacaaagttgtaaatttacaagtattacttctatgatacaaagtagagtctactgactatttagaagtagccactgcattcatttaaactgagattctagcacttcatgcaattctgttaaaattcatagttgttttggccagccagttctctagactgaggcccatacttggacttcatcacaaatcattcataacttcagcagaacaagacaacaacacagaatagatctagttcaccttctaaattttccttttattttttggtaagtgaataatggaaaaattataggtttagtgactgattattaacaaagaacataaataaatgcaacatatgtagttttattaatttcatcagttttgactattcagagtgagtgtttctattcactttccaattaactcccagctttttcctaagaatgatatttcgggtagtgatttttctttttttttttttacttttcagagccctgaaaaaatagccattaacagttactttaactatcagtacaatgtataataaactagtcttattgaaatgcattagtttaaaacaatactgaaggagcaaaaatgtctatatttaaaacctcactccagataaacagacttctgttgtaataaaagttaagctagcttattttatgtttaaaaatatggattaaatcatgaacaggaaggaagtcacatatttgaaaatgaaatatacaaatgatgtgcttttttaagtggtagcaggaagaatatgccaaaaagttgtgtttaacccatttctcatgatacacttagaaaagttatttaactcacaaataaatgctgataatttgtttcaaaagcattttatgcatgacttgaagacactagggcttgtcaatatatattaattgtatagcaagttataaaatgaagcttcattgaattctattaggtcacatcaaaatacactcctaccagataaattcttccatttcgttttgtttctatggcatttgggaagctcagctgtgctcaagaaactctgttcctgtaaacaggttagatattaatgtcttctttattagtcttcaagagaagtaaatctgagaccttgcctactcagttaaaaaactacgaatcaaatcaaacaatttattcacaattgaccatttcggggaaaatcaaaccaagcaaaaggatcatttgaaatcaaataactaaacttgcaaactcagagtagaaatagcttgagttgaactcagccttaaaaatatttattttacttttttgttatgtacttgtatttgaccaagctaacctgataccatccttatatagttctgagcaaactggtatagatatccatttacttttttcagattttatcgtaatcatattgttttcggaatcctttaaaattatataaaaagcagcaacactttaattttgctgactttctcacttattaataagatccaacttatataatcagctgtctataccagtggttgacagaagtatggcattttcttcaataaagcaagaattatactggatggggaaaagttgaaagcttttcctctaagatctggcacaagacgaggatactcactgtctccacttctattcaacacagtcctggaagtaattaggcaagaagaataaacaaaaggcatccaaataggaaaaaaagaagttaagttatccctgtgtgccgatgacataatgttatagaacccctatttttatttttaaaaatgttatttgtatatatttaaggaatacaagtgtaattttattttagggcattcatcacctgaataatatgcattgtacacattaagtaatttctcatcatacaaccccctcccatgcctccacccttctgattccccattgtcaatcattccacactctactttcaaatgtacacattattttgctcccacatgtaagtgagaacatgcagtatttgtctttcagtgtctgaattgtttcacttaagataatggcctccggttccatccatgttgttgcaaaagacatgattttattccttttgtggctaaataatgttttattgtgtatatataccacattttcctcatccaatcaacttaagtaaattctatatatttgctattgtgaatagtgctgcagtaaacatatgagtgaggtatctttttaatataattatttcttttcatttgggtagatacccagttgtgagaatactatatcaaatggtagctctatttttaattcttagagaaatctccattctatttttcatagatgtactaatttacattgtcaccaaccgtatttaagcattgtcttttctccatatccttgccaacatgtggagatttttttgtttatttgttttttaataatagccattttgactggtgtaaaaaattccaccaaaaactgttagaaataataaacaaattcagtaaaattgcaggatacaaaatcaacatatcagtagcattcccatagcaatctatctgaaaaagaaatccagacctgaaactataaaaattctagaagataacattggaaaaacccttctagacattggcttaggcaaggatttcatgaccaagaacccaaaagcaaatgcagtaaaaacaaagataaatagctggggcctaatgaaactaaagagcttttgcagggcaaaaggaacagtcagcagagtaaacaaacagacaacacacagagcggtagaaaatcttcacaatctatacatctgacagaggactaatatccagaatctacaatgaacacaaacaaatcagtaagaaggaaacaaacaatcccatcaaaaagtgttctaaggatatgaatagacaattccctaaagaagatctacagatggccaacaaacatatgaaaaaatgctcaacatcactaatgatcagggaaatgcaaatcaaaaccacgatgtgataccaccttactcctgcaagaatggccataatcaaaaaatcaaaaaacggtagatgttggcatggatgtggtgatcagggaacacttctacactgctggtggggatgtagactagtatacaaccgctatggaaaacagtgtggagattccttaaataactaaaagtagaactaccatttgattcagcaatcccactaccagatatctacccagacaaaaataagttattatatgtaaaagatacttgcacacacaagtttacagcaacacaaagcgcaattgcaaaatcgtggaaccaacccaaaggcccatcaatcaacgagtggataaagagaaactgtggtataactgtggccacaaaaaggaagaaattaacagcatttgcagtgacctggatgagattggagactattattctaagtgaagtaactcaggaatggaaaaccaaacatcgtgtgttctcactgatatgtaggagataagctataagaacacaaaggcataagaataatacaatggactttggggacttggggagaagagttgggggaggcaagggataaaagactacaaatacggtgctgtgtatactgcttgggtgatgggtgcaccaaaatctcacaaatcaccactaaagaacttagtcatgcaatcaaataccacctgtaccccaataacttagggaaaataaaaaataaatttttaaaaaatcccatttacaatagctacaaaaaatacttaggaactggccgggcacggtggctcacgcctgtaatcccatcactttgggaggccgaggttggcggatcacctgaggtcaggagtttgaaaccagactgaccaacgtggtgaagccctgtctctactaaaaatacaaaaattagcctaatgtggaggcacacacctgtaatcccagctacctgggtggccgaggcatgagaatcgctggaatccaggaggcagaggttgcagtgagcagagatcatgacactgcactccagactgggcgacagagcaagactctgtcctctgtccacccgcccccacaaaaaaaggaataaatttaaccaaagaagtgaaagacctggaaactgtaagacattgatgaaagcaattgaagaagccacaaataaatggaaaggtattctgtgttcatgtattggaagaattaatattgttaaaattcctacactacccaaagctttctacagtcaatgcaatctttatcaaaacaccagtgacattttttacagaaattggaaccacaaaagagcttgaagacccaaaataatgttgagcaaaaagaacaaaactggtgtcatcacactacttgacaccaaaatatactacaaagctatggtaaccaaaacagatggtgctggcataaaaacagacacatagaccaatggaataaaacagaggccagaaataaatccacagaattatagccagctgattttcaacaatggtaccaggtatatccaatgcgaaaagaacaatcttctcaataaatggtgctggaaaaaatagatatccacatgcagaaaaaattagacccttatatcagaccatgtacaaaaattaactcataatggattaaaggcataaacgtaagacctgaaactataagactaccagaaggaaacataagggaagtctccatgactatgatctgggcaaaaattttctggatatgacctcaaaagcacaggaaacaaaaccaaatatagacaaatgggattacatcaaactcaaaaagttctgcacagtaaaggaaagaatcaacagagtgaagagaaaacctacagaatgggatgaaatatttgtacaccatacatcttataaggggttagtagccaaaatagatcagtaactcaaacaaataaatagcaagaaaacaaataacccaattaaaaatgagcaaaagatctgagcaggcatttctcaagagaagacattcacatagccaacaggaatacgaaaacatgttcagcatcattaaacatcaggtaaatgtaaataaatccacagtgagatatcaactcaaacctgttagaatgacatcaagaaggcaaaagataacaagtgttcctgagaaggtagagaaaagggaacccttgcacaccgttggtgggaatgtgaattaatataaccattattgaaaacagtaggggctttctcaaaaaaattaaaactagaactaacatatgatccagcagtcccactactggctatataccgaaaggaaatgaaatcaacacgttgaagagatatctgcacacccaagtttattgcagcacattcacaattgctgagatatggaatcaacctaagggtccatcaactggtgaatgaataaaagaaaaaatgtggtatacgtacacaatagaatactgttcatccatgaagagaatgaaacctgccatttgcagcaacatgaatgaacctggaggatattaagttaaataagccaggcagagaaagaaaaaataccacgttatcttactttatgcggaatctgaaaaggttgattttaaagtagagaataaaatgttggttaccagaaggtgaggtagttaagagagagggaggattatgaagataacggttaaataatacatatttacagttagatatgagaaataaaatcaagagatctattgtacaatatggtgactatagttaatgatgatacggattgagtattccttatccaaaatgcttgggacctgaagtgtttcagatttgggattttatggaatgcttacatatacataataaggtatcttgggcatgggacccaagactaaacacaaattcacttatgttttcctgcactttatacacgtaactttgaggtaattttatacagtatttttagcagttttgtgcttgaaaaaaagtttgcattaaatacttatatgtccaattttccacgtatgacatcatttcagtgctcaaaaagtttcagattttggagcatttcagagtgtgtatttttggattagggatgctcaacctaatttttttcaaatgaaaaatactaagagagtggatgttaaatgataacatgtgagggaatgcatttgttaattagctagatttaaccatatcacaatgtatatgtacttcaaaccatcatgttgaacacaataaatacatacaattctctatgttcatttaaaaaataagcttgaaaacaagaattttacaagtttgattttgattctggatttttttaacttagatgcagacatattatctgatcagggcgaacagaatttagcaaatcattataaaatctttttgaaagtaataaaggaataagtaaaggtattgccctccttttttttccttaggaaatgtttagattggtccttagctttgtttcttgttacacctgtagaatatagctgttgcatacataactgtgtctaaataatctggggttcttgttaaattttagagtctgtttcagtaggtttggaatgtgcctgacattcgacatttttttttttttttttttttttttttggagacagagtcttgctctgtcacccaggctggagttcagtggtggctggagtgcagtggtgggatctcggctcactgcaacctccacctccggggttcaagtgattctcctgcctcagcccccagagtagctgggattacaggcgcccaccaccacacccagctaatttttgtatttttagtagagacggtgtttcaccatgttggccaggctggtctcgaactcctgacctcaagtgatctaaccccctcagcctcccaaagttctgggattacaagtgtgagccaccacacccggccagtattcaacatcttacttaacaagctcatatataacggcgatgctgttaattggtaagtagcaagggtgcatgcaggcaaagttttctcagtattgatggaagccctcacttaaacctagatagcatttaataatttgggttattggtgtcctatcctttacttagcagatttttaacatgtcatctggtaaccatggtaaagattatgatactaaaagcatatgttttagggtttaacgtcacaggactttaaaatctcggttatagctttggacaaaaaacttactaaatctcagttttcttatctgcaaaatgtgaataattctacttacacaatactgtgttaatggtttattcaatcacaaaaagcatctaaaatgccccacaattatcatgtgaatttagaaatactagattccttctacacatctacacacagacacacacattaacacacacacacatacacacacaaacaggggggagagagggtgctgtataaggaatccacaagatatgcaaaatgaatctggtatttctaaatatgcatgatatttgtggggcagtttagatgcttcttgtgttttaataaaccatcaacccagtattatgtaggtattatcacttgtgtgtgtgtgaatattcagacacatcttttttcaacatcttcaatgctggagcattgtgtgagctagaacccagctaagagagggaggtcttcaaagttgtaaaacatatgtgctcaagtgagtacaggcatcaaaatgaattcaagagtaccctttaaaatgctgcatgtcatatacctggttatggcttttgggaaaaattctaatttagatccctttccaagtggcacaccatagtgctttgcaaatgatagactcaagaaggaataaatgtattccggctgaaagttttgtcatgggacaattttatgttacataaatggaaattcatttggaagtgacagggaggttaattttaaatcaattcaaaagctatgaatcccttttggcaactattatgtttagtttaaaagaactctgtaggcttattatagataccatgttaagcttttgttgtgcacgtatatgggtgtgtagttcacattctcagtttttattactaaatttttcaatacaaaaattaattcattttaattgacaatcaagtacaagatatatcaaaatcgagcaatacatattttcattttgtatgaaatgtgatgtatatcgtgaaaaaattttaaatgagaacagtaaggttttctatatttttaatatatccgtgcccacttcacaaatagaaatgaaatgccataatcttcatgtatgagaaatattaagttcattcctatattcagttgctattgcccagtggtatgaaagtcctacctcaaaaaggtgtagccaaagaaagataactggcggggcactgtggctcgtgcctgtaatcccagcattttgggaagccaaggtgagtggatcacttgaggtcaggagttcaagtccagcctgaccaacatggtgaaactctgtctctactaaaaaaatacaaaattagccgggcgtggtggcacacgcctgtaatctcagctacttgggaggctgaggcagaagaatcgcttgaacctggaaggcacaggttgcagtgagccgagatcgcgccattgtactccagcctgggcaacaagagtgaaactccatttcaaaaaaaaaagagagaaagaaaaagaaagagggagggagggagggaaggaagggaggaagggagggaaggagggaggaaggggagggagggagggaggaaaccaatggcgtgcgttttatattatttggaaaccttatatttgactcctctaaaattcagaaatggttttatattgtacaaccgtttccctcaaatatttggtaatggggctgacatagtctatccttacttcaaagtagtctgggtttttgctcgctggatgcatgaacatgttgagatatttaatcactacttcttgtgtcacacttccctctgtcacagttggatggggaatgagctgataaaatatacataattaatagataaggtacattgaataatattacaaatacatgtaactggaagaacaataacactaccacccggtccttccccactagcctcaccatttgggagtttttgctaggagagaaaagtggttaatcctcactagcttctcacctcagagattacagatcattctgccctggtgtttgataaggcctccaaaataaagcaaaaagcttctgccagctttttgtgtaggcaaagtgtagtcatctttgtggtaggtggttctgtaaaggacctgctatttacgcctctgttccccaccacaccccacacccaggaaacaacttgaaagaggaaggagagtccggacgcggtggctcacacctgtaatcccagaagtttgggaggccaagttgggtgggtcacttgagatcaggagttcaagaccagcctggccaacatggtgaaaccccatctgtactaaaaatacaacaattagctgggtgtggtggtgcatgcctgtaatcccagctacttgagaggctgaggcaggagaatcactagaacctggaaggctgaggttgcagtgagccgagatcgcgccattgcactccagcctaggtgacaagagggaaactttgtcaaaaaaaaagaaaaaaaaaaaggaaggagaagccaaatattggcactcgttttgcttaatactataacggacaggcgcagtggctcacacctgtaatcccagcactttgggaggccgaggcgggcggatcacgaggtcatgagatcgagaccatcctggctaacaaggtgaaaccccatctctactaaaaatacaaaaaaattagccgggcgtggtggcaggtgcctgtggtcccagctactcaggaggcagaggcaggagaatggcatgaacccgggaggcggagcttgcagtgagccgagatcgcgccactgcactccagcctggacgactgagccagattccgtctcataaaaaaaaaaaaaaataataataataataataatataagttggccagcttggcaagttttgcaaactttggaaaatgtttctcttcctcactatgaattagattaggctgtccttgctaattaatggggacccatgggagatggcgctaatctgggaggagcagattatattctaagggtacaggctcttggatcaggctatctgggattaaatctaccattgactagctgtgtgaccttgagcaaccttgaggttgctaggtgtgtatcacctctgagactcgattgtgacatctataaaatgttgataaaataagtccctaaatgattaaactgttgtgaaaactatattgctgtatgtcattgaatctaagaaataataaattgcaagatagaccattgttgtgtgtaggactaacaaattaaaaaacaggatacccctaaacgctatacactaatgattttaagacatattgattttagaaatgttaaaatgtgaaatgtcatctcagaatcaattaaatacagtagttaattctgatgagttgcttagatcaatacttggcatatagtaaatgatcaatgtttcctattatggggtggaatttccctgaaggaaggcagtcatttctagcttgaaaatggaggccttttagaaaggaagcccatagccttcaataggaaagagtaagaataggaactggtgcgtgctcacaaaaaacgttgtgtaggggttaattttttcctgcttttctgctacacaacacaagaccaagccattgttagtatagagtttggcctttctccatcccttaacgtaattctcttagttacccccaatcccaaccctccagtaaaggccagtattcctacagaactctctgatggagttgtggggactataagggtgagtagtaacaggaggagagcctgttccatgtttggtgtggggctgaagcccatgctgaggggcagcagcacactaggaagagccattgtccagtaaatggacaattgtccagtaaatccatgtggtgacaagcttagcgaacagtggcctgggcgaaagaatcactgagagtggccaggagggatctaaacccagagaagtgattacccaatagacttctgacttaggagtaaatgtgagaagcaaaatctcttttcccagaattttacaaaaaatcgactcttggaatggcagcggtggctaatacttaggtcacgtagatgataaaattataagacaatatacataatctagactgctgttcattgaatcatgtcagtgtgtttgccacatttcttctaaaagaacatttttcatattttatcatttctgcaatcagtagtagtaataataatatctaacacatacaacttagtatgttctgggtggtattctaagtgcattgtcgatattaagtcatttgtaactcagtgagttagcaacagttgttatccctcatttaacaattggggaaactgaggtgtgaaaaattttcttctccaaggtgtcacacattcacaaatacacacagacacacacacacatagacgcacacacaaacacacacacacacccatctattaagtggtagaggttggcagcatgatcctaaccgttgcatgctcatactattttacaagaccatatgatctaaaatctattggtagcttagaatttatgtaccgctaaatatgtacatctattgtgtactcacaaaaattaaaaataaaaaaataatttaggatatctgttatggtggttaaattgtgcctgcagtgcaattccaatctaccttcctgcgtcctgggaactctgaggaccggtatagagcaatgacaggaagcaagggctctggcttcatatctgcattggaatccaagctctgacacaagctaagcaagcttgagaaactttttaaaagttaaacattttattttcaaagagttgtagagttaagaacagttgtaaaaaataatataaaagatcctatgtgaaatatcctgtgtggcttttgctcggttatccccaattgtaatatcttgcaaattatattcaaacattataatgaggattttgttacaattaacctctctaattcagattttcccagttttacctatactcatgtgtgtgtatatatttagttaaatgcaatttttacacatgtagattagtgcgtccaccacgacagtcaaaatacggatgttacatgaccacaaagatctctcctgttgacctttaataaaatcatcaagcttcctcttgtcaccctgtcccatgcctaacatgtggcaaccattaatctgttcttcatgtctataattttgtcatttcaagaatattatgcaaatagaattgtatggtatttaatcctttcgaactagcttttttcagccagcataattgcttaatgatccatctaaattgttgcatattgcaatagtttgttactttttattactaatatatgttgctgatttatttatggttgtggacatcctacagtttcaccattcactgactgagagatattgttgtttacagtgtggggctgttactaataaaattgctgtgaaccctaatgtacaggatttgtgtgaacataagtcttcatttctctgggataaatgcccaggagtgcactttttggactataatggtagtctcatatgtcgtattgatgttgtcgtttatttttaaatttctttttcattgacaattaatatttgtttgtatttataggttacaatatggtgctttgatatatgcttacaatgcagagtgattaaatcaggttaatgaatctgttacctcatattttttttgtggtgaaaatattaaaatccactatttcagcaattttgaaatatatgatgcattatgatatattatagtcaccatcatgtacaatagatcactaaagcttcttcctcctacctaactaaaaattcgtaccctttgatcaacatctttcttttcccggtaggacccttccgccatttctgtggtaatcttcattctaatctgtatttctatgagttcaacttttttagattctgtccatcatcagatgaataaataattaaaatgcagcctccacctgctgggtttaagcgattctcatgcctcagtctcttgagtagctgggactgcaggcgcccgccaccatgctcggctaattttttgtatttttagtagagaaggggtttcaacatgttgaccatgctggtctcaaactcctgacctcaagtgatctgcccctctcggcctcccaaagtgctaggattacaggtgtgagactccgcacctggctcctttagcttttaagaagagaaagaattgaaattatgattacaaccaagtgaagttgaacttgaactcctaattagaggatggttctgatgttaatttacgtaaaggaattgtgatttttgtttttctgctcccactccaatccgttttttcccacacagaatattcccaactcttccttcttgaacctttgtaacattactggcattcgtttctcttatccataagctctaatcatccaatgtttcttcttgctgttattatattgaacaaatatttattagatcaatcaggaataggaagaatagataattttgttttactttcattttttccttctctaatgtacttcctttctttatgtagatctaagtttctgacttacatcattttctttttctctgaagtccttcttttgacatttcttgcaaggcagatctactggcagcaaattccctcagcgtgtttgtctgataaagtattcatttctcttttacttttgaaggataatttcaccaatacagcattttaggttggtggatttattttttctctctaaattttaaatatttcagtacactcttttcttgctggcttggcccaatccattttatgctcttttttgttctgctctgtcactgtgaagctgacccctataaattgcatttccttagctcccttgccgagtagtctcctgttggttttggccaatggaaggcataaacataagacagaaaggcagaaagagagcagatctgggacattccttttacattgacctccactctctttgtgccttatttcccaccatggcagcttatatctctaactatcctgttaagaatctcctctatggctctatctcttactggatttagaaaatcctacttccttcacttgactcttcaggcatggtaaggctgggaaaggtatatcacaattgcctactggaggttgtctctaggtgcctcgatagccccttttggtttctttaagcccattcacacctctgaaagtagttcctttgtactgttttattgaaccatccatgttgaattctatttcttgccagggacatggctgataaagggagataagaaaaatcagtaacttctccctttgaagtaacaaagtataagatgaaagtaaatgaaactcatagttactttaagaaaatgcgtttgtgtatatataaacaatttctacttttcatgactctatctggtggtttttagtataaaatactcactagaacgtgagattaaagtttgccactccatactgatttgcatatggactgttcgctcaagaagtaagggttgaagaaattggaacgacttatcatttaaatcaggaatcatatgacaattcaactggtgacaatgtgccctactttctaagagcccaagttgtacatatgattgcttgtgtatgtatgtgtaagtcactccacgcacatatgcacgtcacccttgagttctgagtttacaaaactaaactaaattcagttactaaaaatatcaaatttgtgtaattttcatgtatttctatgcaagcacatcattactgaaaggccctattatactgttgcaaaatactcatgaagtaccaaggtgcctgattccaactgttatttatttttttttttttttggctattatgttcctaacatagcacataaactagctcattttctcatggtacttaactaaggatacttttttaaaatctagagtattacagggtctttgcatacctacctcttaaactgatttgttttggattctggaaaacttagcacgttggttaagtggctgtgaagaaattttgatgtatacgtccacctcacatagacctaatagctatgtgtttggctagtattttgtggaaacaaataattaagagcaagaaaagttggatttccttaagaacactgaatcgcatagagattgggtaattactggagacaaaaaggcctgtcaataaaggtcagatatatgcaactccctccttttgctgaaaatctattattccatgttgaattagatattaaaagaatattatactttccaataattatattgttataatgcaggggatatatttctcaccaatgactctacatccacaatgtatgatgaaataaaatatatatttatttttaaaaatgcctttagggttttaagatacttaagaattcatttcttgttcacttttaaatttagtgctcttagttctaagagtttgtcatctgttttatgatacaggttaatactgcaatataagcaaggaccagtcttcattttacaacatgtatcataaaactgtaggctaaagaaaagtaattaaaaaacactctgatgcatgactttaatgtaattaaaatatattttgcattcatgaaaaattacaggtctctatcaatccctctataaacaattataatcttattacttaaaattatttcaacatcatacacatatggtgtatatttagctatagtcgtttaggtttttaaaatctgctttcttttctaaatcataattttagaccttttgctatgttcgcaatctttgtgtaatcacatgcatagcagacaatagcacattgtaagtatattagaaatatgaaaacacagtctaatctcaatgcaaaacactgttgaaaaacacagcatgataaaaaattaacttataaatggagagatatactctgctaatggattggaatactcaacatggtaaagatgtcaattatctccaaattaatctatagttttaatgccatttctactaaaataccagcaaggtctttttagtagacttggatcagcttattctaaatttatacggaaaagtacaagcctgataatagctaatacaatcttgacaaagaagaataaagtggaaagaatcactccactaaatattaaggcttattatgtagctacagtaatcaagacagtgtggaattgggggagagatagacgcatagttcaatgcaatagaatagagattccagaaatagacccgcacaaatatgtgcaaactcattttttaaaaagttgtgaaagcaattccaaggaggaattttaacagcctttccatttctatagccttttcaacaaatagtgtgcgttttttctaagtgagtggtgtttgagcaagtagacatctaaaggcaaaacaaacaaagcccacccataaatatataagtaaataaatagagcctcaacttaagtcttatgcaaaattatctcaaatgtcaaatataaaacataaaactacaaatattttagaaaaacatatgggagaaaattttgtgactgaggcaaagactttttacactttacacaaatagcacaatccataaaaaagaaaaactgataaattggacttcgttaaaattaaaacttttgatctgaaaaggatcctcttaagaagtgaaatacaaggtacagaatgggagaaaatatttgcatatcagttgcaaaaacagggactatatacgaagaacttagaaaactcaaaagcaaaaatccaaaaataaattaattaggaaatgagccaaaggcacgaagagacattttactgaatagtatatataaatgacaaacatatggaaaagatattaaatatcactagacatcaagcaaatataaattgaaaccacagtgagataaaactacacatttttcagagtgtctgaaataaaaaatagtgacactaccaccaaataactagcaaaaatgtggagaaatgggatcactcgtacattactgaaaagaatatcagtctggaaaatagtttggcagtttgttaaaaataaacaaacactgtgtatgtttaccactccagcctgggcaacagagtgagaccctgtctcaaaaaaaaaaaaagctgaagaaaaatttttttaaatggggaatataggtggaagtgagagcctgatagcctaatatactttatcttttctaatgtatttaactgctgctcttatcattgcttctatttaaaaatgtattatatttttgctaaccaaccttctaggagccaattgtactctcagatttccccgttttcatactgaggttttatcgaagtagcccttctccaagtccctcccctttttattttaaatatagagattttaaactatttctaatcttactctcttctccaagttcctgaaggtattacctcagaatatgaaaacccttaaatgtacctcatttgctaacgtggagagagagacatgtaccttggaagataatttgtgatggaaaaagcatatgcctacacacacacacacacacacacacacacacacacttaaacttgggttcaataacatattaaacttgggttcaataacatcatacttctcaatattccaaataaagttaactctaaagattcaccataagattttcaatattttaaaaatgtttaaggaaatataaatgctttaggttgtttaggttgtttagacatctattaaacccagaatatactttaagcactaatctttaatatactatagattaaaagctatctttcaaataaccagacttcacaatgtttaaacattttataaaactgaacagaattttgagacataaaccaatataaaactttttttatcctcctctaaattcaatccatttgtgaaacctcatttaaattcgaatcaaatattttctctgatttccattaacaggctctgactctcaggcttcagtgagtaagtatattcattgtggggctcagaaaattttgaaccaaattataaatggtgtttatttgtgttttctttccatttctttttaaggcattctgtagtgaggtattcaaaacaggatgccactcaaagactctctctctctctctctctctctttaaaaactattagagaaaatagcatgtgcagcttcatctgctacataaatcctctcaaagcttctctcctttccagatgatttgagttgtcaggaagcaaatgaagcttaagcttttgggcccctttatttcatagaagtcttcaaaaatatgtgcagaactttcatataatcacgtgctcgaaaaatatgcacaactaagaatagcctcgagctttaggcaccgcaatcgttggatcttctgttcttatcaattcttaccaattgtttcttaggatgacacattaaaccttcagaaaaaccttatcaggatgaaaacttagccttgccatggaaaaaaatggtggttttaagaacagagtaaaaaaataattctaacagggaggggatttttttcttttgcttttttaaagaaagaaattaggaaaggattttaatttgagcctacaagtttgctgaagttgcactctaaaatgtcatccacatagatttatattgttttctttactctttcttgtgtagtaataacttggtctaggctttcaataaataaacttatgaaacagttttgagtattaacaataacacaatggcactgagagcctgtttttacaagactctaaatattttatttaaacgatacccagaattctgatttgcatatttaaaattttcctgaattagataattcttttaagtgtgttacgttatataatctagttgcagtatccttttaacaaaaaaaagcaagtgcaacagtgttaaacatgacattgatgccacctaatctccatcaggcttcacaatgtagttttatcttatatttatttgtatgcacgaatgtcagtgtcgtatggcaggagtctgtaaactttggctcataggctaaacccagcccactgtcttttaaaaaaaaaagatagatagataactgtaaattcacatgcagttgtaagaaataatacagaaagatcctgtgtgccattttacccagtccctccttaaggtaaagtcacagaactatagaacaatattacaacaagatattgacatcagcacagataaaatacaggatatttccatcaccacaaggatcactcatgttgccctttcatggtcagacccacttttttcctgccctcaggcactccttaatctctagcaactactaatatgatctctatttgtataattttatcatctcaaaagtgttatgtaaatgaaaccctgtattatgtagctatttaggactagccttgttcactcagcataattctctggagattcttccagatttgtaatgtgcatcaacaatgtgttcctttgtactgctgagtagtattccatggtatgaatatgccagtttgattaaccatttgcctgttgaaggacatctgggttgtttccagtttctgcctattacaaatacagctgctatgaagactcatgtacagtttttttatgagcaaattttcatttatctgggattaatgccatggaatgaaatttctgggctgtaggttagttgtatgtttagttttttacaatgcaccaaacttttacagagtacctttaccatctcatgtttccaccaacaatgtgtaagtgatctcatttctctgcattcttgccagtgtttgatgttgtcactattttttaacttagccattctaatatgcacagagttatatcgtattgaggttttaattcgaatttccctaagagccaatgatgctgaacatcttttcacaagcttatccgccatctatgtgttgtctttggtgaaatgtctccatgtcttttgcccatttttctaatggatttttttgtgtctattttgtttttacttttgggttacatgaattcttcatttagtctagatactagtgcatggtcagatatatggtttgcaggtatttttctcgatgtgcagcctgtctcttcatcctcttggcagcatctttctcagagcaaaattttaaaattttgtatgtcaaatttatcaaattgtgtcttttaaggcacacgattttaacgtcaaatctaagaactcctcctagcctttcatcctgaagactctcctgtatgtttttgtaaaatatttattattttgtgtttcacatttaaattcatcatctatttgcattttattttgcataaggtgtaaagttatgtcaaggttctttttcttcttttttctttccattatttttgtccacttgttctaagacccatgtgttgaaaagactatctttgctccactgaattattttgcactgtgtcaaaatcagttgagcaatttgtgtgggtctatttctgaagtctctattctgttccattaatctgcgtgtctatcccaacaccaacaccacactatcttgattactgtagctatttaataagtcttcagtctggtagacttattcctcttacttcattcttccttttcaacattgttttagctattctaaatccattgccttttcacataaattttagagtgccttttcacataaatttttcctacacctaaattccaaaaatattgctgagattttgataaaaattgtgtaaactgtgtaacagtttgggtaaaattgacattactgtgttgaatctctcaatccacgagcacaatatatttcttcattaatttagatgttctatgatttacttctaaaacttttttttgctttcaccatgtaagtacatggcttgttagatttatatttaatttttgtgacatagtaaaatatactatattttaaatttccatgtccatatgttcattattaattcacagaatgcaagtgattgttaatagactttatttttggagaacctttaggttcacagcaaaattgaaagacagagatttcccatctacccattgtgcccgcacgagcatggcctctgtcattattaataactctcaccagagtggtacattcgttacaataaatgaacctacgtcaacacatcattataactcagatccataggttccattagagtttactcttgttgttgtgttttctgtgtgtttggacaaatttatagtgatgtgtatctactatgataatatcatacagagtagtttcactgacctaaaatatttgtgctctgcctagtcatgcctccctgccaactaacccctggcaaccactgatatttttactatcttcataattttacctttcctggatgtcatatagttggaatcctacagtatatagaagcattttcagattggcttccttcagttagaaacaggcatttaagtttccttagtgtattttcatgtcttgatagctcatttctttttagcatctatagtctgaatgtaccagtttatttatccattcacctactgaagaacatcttgttgtttccaagttcaggcaattatgaataaagctgctataaacatccatctgcaggtttttgtgcggacataagttttcagcttatttgggtaaataccaaagagtctaattacttgatcatatagcaagagtatgtttagttttgtaaaaaatccttaaactgattttcagtggttgtacaagtttacattctcacaagcaatgaacaagagttcctattactccatatcctcaccagcattgggtggtgtcactgttctgagtgttgaccattctaagaggtatgtagtagcatcacattgttgttttaatttgcaatttcctgatgacatatgatgtgaagcgtcttttcatacgcctgttttccatctgtatatcttctttggtgagttatctgttaaggtgttttgcccatttttaaaatagagttgtttgttttcttattgttgatttttaacagttctttgtatattttggataacagtccattacctgatatgtcttttgcaaatattctctcctattctgtggcttgtctttacattcttttgacaatgtcttttgcagcatagaatttttcaatattaatgaagtcctgcttatcaattatttcttgcataggtcatgtctttggtgttatatctaaaaagtcatcaccagacccatatagattttctcctatgttatcttctgtgggctttatagttttgcattttacatttaagtttctgatccattttgagttaatgtttgtgaaaggtgtttgcatgtggatgcccagttgttccagcaccatttattgaaaaggttgtctttgctccgttatcaaacatcagtcagttgactatatttatgtgggtttattcctgggctctctattctgttccattgatctcttcttttgccaataagacactgtcttgattaccgaagtcttgaagtagagcagtctcaatcttctgactttgtgcttgtccttcaatattgtttttgtttgtttgtttgtttgtttgagatggagtctccctctctctgtcacccaggctggagtgcaatggcatgatctcggctcactgcaatctccgcctcctgggttcaagcgattctttcatttcagcctctcaagtagctgggattacaggcgtgtgccaccactcccagctaatttttgttgtttttagtacagacggggcttcatgatgttggccaggctggtctcatactcctgacctcaagtgatctgcccaccttggcctcccaaagtgctgggattacaggtgtgagccaccacgcccagcccttcaatgttgttttggctattcaaggtttcttgcctttccatatcatttttagaatctctttgttaatatctgcaaagtaactactgagattttgattgggattacattgagtctatagatcaatttgagaataactgacataataaaaatattgagccttcccatccatgaatatggattatcttctatgatttctttcatcagagggttgcagttttcctcatatagatatggtatgtattttgctagttttagatctaagaatttcatttgtgggaggtgctaatgtaaatggttacaatcaatttttgtatatttatcttgcatcctgctaccttgatgaattcacttatcaataatttctaggagattatttatagatagcttgaaaattttattttcatgccatctacatataagggacaattttatgtcttcctttcccatctgtatggattgatttaattgtcttgcctcattgcactggctagaacttgtagcagtacgtgaataagagtggtgagcgtgtgcattcacgccttgttcacaatattaaggggaaagcatttaatacttcactattaagtatgaagttagctgtaggtttatgtagatgttgtttattaagttgaggaaattctcctttagtcctatttttcagacaggttgtttcaagattagatatatcagtttgtcaaatgcttttagtacatttactgataacatcgtgtgatttttcctctatgacctgttaatatggtagattgtagtgactaattttcaaatatcaagccagatttacatcctggaaataaaccccaagtgatccattagtacattgctgaattttatgtgctgaaattgtattaataaattttccattaatatttgtaaggaatatggatttatagttttcttcttttgtactgtttttctggtttgggtatcaggctattgctggactcaacacatatactcagaattgttttcttcccttccatgttctggaaaagaatgtgtagaattggtgttaattcttcacaagattggcatacttttccaatgcagttatagaagtttgcttttgtagaagtttttaaattatgagttatatttccttaacagttatactcattatctagtatatccaaattactattaaatagccaaagtctaggccattcaaattatccattttatattcattgatttacagtagtttgtgccttttgaagaatcaatctatttcatctaaattattaaatacttatgtgaagaattgttcatagtaaacccttactgtctttttttttctttgtattttccaggcctgtagtaatattccctacttcatttctgatacgggtaacttgtgtcctctcaattttttctttgtcacttttagcacattgtcaattttattgaccgttttgaaaaaatagctctttgttaatgaatcttctttactgtttttctgtttttattttgattagtttttactctttattattttcttcttgagatgagaactttgattattgatctgagacttttcatcttgtctagtgtatgcgtttgggagcagctttttaaaacgcaatgcttaatttaacctaaatgacaatattttatagtaggcagtgcatacggtgttatctttaaaacctggtcttgctattaggtacctctctgagacgaaagtcttcaagcttattgaagtttatcaattagcaggtcgattaaaatgtcaacttttcttttaatatacccaaggtataatctatttgagggcagggacctgaagttgttagctcatatctttaatgcagaaaatctggccctaataaatgtttcataaataaatacacatttattccacggcccagttccattgttttaaatgagaatttgtcactatggtcatcccatagtaccaaggttcataatttcttttagcatacactctcaaagagatttggtttgctactctcaaacattcaaagtttattttaaattttatgatgatctggatcataaatttctttatttccctctcttgcctgtttccttttttccaactgatatcactaaactcctattacacccaatgtgcttttgagagctaaagttatcaacataatataaatagcaattaattcttaatatcaagaagtttacagctgagtagtaaagatgcattcatattgttagacccatctatgagtgggagtgaggagaagctaaaaaaaataatcttcataaagtaaatttaaacaaagcccagaagaatgagggagcatataatacacaaaggatataatacaaagaaattgcaagtggagacaattttattcacacaacaaaatgacaagcaatagtgataaagcaactaaaaaggaagacacaactgttttgatggagcttgccttccatcaggtaagaaacaccttaaacatacacccaatttatttatcacacatgcaaaaagggagtaaagctgcatgctcagaaaacatgtatgatgaattttttaaataatctgagatataatagtaggaaagcacataacataactcaaggaagttcagagatgtagggttgaaaatgaaggcaaaggctacattgcgtaggatctattcatccttgatcatattttctacaaggtatcacactagtactgagtatccatccaagactgaaatggtaggggtgagcctgcttgctaaaaattcttcagttgtattagtggcagtggctccactcctcgctaccacacccattttgcaattctctgccctgttttttgccctggaaagcttgtctcttcatttgtatcaccaacgcctcttgtgcactaacttttaggaaattatgtgacaccagctggacatcagagggcaagggaaaaaaaggtttggatatttgtgttccacttcacatatgcctcactaaggtcctggtagtgactgcccttttctattgctattccaacattattcctttaccttgacatattaggcctggaggtagaaacaaattacctctcttgctgcttgctaggtgactcaccatcccttatttgttctcatcagcctgcctatatgtttgtccatagttctttcaccgaattattatctgttaaatgcttttgaatctgctacctatatttcctaccaggatcttcactaataccccataagagatacaactattaaaacatgttactgattctcagctcactagcatcaatgcatttactatctttgtactcataatacctttcttacattcagaaatctttaaaaatcttcattaatccctgtacatttacctcataaaacagttgggaatcaatccacaaagtgaggagtcattattttcacaacacaggcaaattagttttgagttttgcttatatttggtaagcaaatgttttctttcttgactctatagatagtactgatatgtagtaccaagtcctgaaatcacatcgttatgtgaatgccatgggcttcattgtctatggaaatgtgagttaaagctctttttttttttttgtccagtggaaaaaaaaatctgaacatttaaaaatgaactcacaaggttccagatatctacttactaattttaaagggaattaagatggtgtcaagtaaaatttatttacagaacacacacacacacacacacacacacacacacacacacacacacacacaataatctctaaagtatcaaccatagatggagtggggaaccaggaccttcactcccacctggcaataaggcagcacacttctacctctatcttccaccagaacagtcagaaggggacgagctaaaatagatttaaataagatccagagtctgataatgtaatatcccaaatgccaaaaaagaaaatctcaactggaatgcaaaaagatagtagtcacttatactgacatgacaaagatgacagaattatctagcaaggatattaaagtagccatcccgaaaattgttgagtaagctttttaaaacattttgcaacaaataaaaaatgggaaaagtcagaaagaaatagaagacatagaacgacatgacattttagaactaaaaatatcgtaatcaaaaaaaagttcaataaatggtctcaacagtagaatggaggtgaggagacaggggaaatctgtgtgcagaaagataggacaatagaaattacacagtcgtaacaagaaggaaaaaaacgatttttaaaatgaaaatattctcagttgtcctatgggattataataaaagatctacggtttatgccatcagagtttcaaaaagggagggtgttgttgaacaagtactcaagcacataatgattgaaaaataccaaattttgtaaaatgcaaaaccctacagattcaaggagctgagtatacaggataaacccaaagaaactcatgcttagacgcatcatagtcaaatgtctgaaaactagttatattttttttttaaaaaaagtcttaaaaacagtgaaagagaaaaagacactttatctataggcaaaaaagttcaaatggcagaggatttcttatgtgaaaccatgaaagcccgaaggaagaagtatgacatttttcaagtgatgaaaggagagaactgtcaacttccagaaaatagaagaggaggcaacacttccaaatgtactttatgaggaagaagtattttgataataaaaccaggtaagcacagtagaagagtcaacaaattacagaccaataaaactcatggatatagagacaaaaagccttaacaaatttttacacattatattaagaagctaaagaagaataatcacttgatcatatcaattgatggaggggaaaaaacgtttgacaaaattcagtgccccatttatgataaaagctctcagaaaactaacaatggaggagaacgtcctcaacttggaaaagaataactacagaaatcttatagctaacattgtaataataatgaaagaatttacacctttcttcctaatattaggattaaggcaaagacggttgctttcagccctactattattcatagtactggaagttctagctagtgtaaaaatgcaagaaaagtggataaaagcgtacaaatcaggaaggaaaagttatactgtctccatttgcagatgttatgatgatctatgtaaaatcccaggtattctacaaagttactcttagaaatgatgagtttgttaaggtcttaggatacaagatcaacttataaaagtcaattgctaatcaatgaatatgaagtttcatttatataagatgaataagttctagagatctgctgtacaacatcgtatctatatgtaacaatacagcattataatttaagaatctgttcgttgggtagatctcatattaaatcttatcacagtaaaatgattattaaaaattaattgtatttttgtatacaagcaattaactactgaaacccaaaatttttcacatagtatcttgcagtcactctgaaacaatgaaatacttatgaatctaataaaacatttaccagatctatatactacaaactaaaaagctaaggaaataatgcaaagacttaaataaacggagatatatactgtattaatggaattggaggatacaacatagtaaatatatcaattcttccaaaactaatctatagtttgaatgcaattcctatcaaaacatcagtgaaacatttttgtctatttggacaccctccaaattgcttgaattctatttgtcttattttttctggtcctagtgcctataaactcactcacaaactagcatattttcccattggacttaactaaagagattttttaaacacctaagaaatatatgccttataatatgggtaacatttcaaccaatatggatcactgtggaaaaaggaagtagaaatgatccataatgattttttccctaatcaataaatttgtgaattttatataagtatattacctaataagcctgtttctcttcaacttatttgtcctgtgaagctgcattaatcataatgcttggaattatattaaataatcaaacaagttgggaaaatgaccctgcacttccaaagtaatataaaataatgcctttagggtttccaattatttaagaattaactccttgttcactttacgtttaccatattcagttctttctaattaatatgccatctatttaataacacaaggatgactggttaatattggaatataatcatgggccagtcttcattttacaacatgtatcatctaagtgtagacaaaaaaaagtaatttaaaaaaatgtgtatgagttcactgtaataaaaattatgctttatatttttgaaaaatgtatgtctaattaattcatctgtaaacaattgtaatttcattaaaattttaacaaaataatttcaactttcattttgaatcgggggtacatgttcaggagtttgttacaagggcatattgtgtgatgtggaggtttggggtactgatgatccagtcacccaggtagtgagcattgtacccagtaggtagtttttcagctcacacccgcttccctccattccccctctagtagtccccagtatctcttgttcccatctttatgtccactgtgtactcagtgttttgctcccatttataagtgagaacatgcggtatttggttttctgttcctgtgttaatttgcataggataatggcctccagctgcattcatcttgctgcaaagtacatgatttcattctttttcatgaccatgcagctaaccaaggaggtgaaagaactatacaaggagaactacaaaacactgctgaaagaaatcagagacaacacaaataaatgcaaaacatttcatgctcttggattggaagaataaatattgttaaaatggccatactgcccaaagcaatttacagattcagtgctaatcttatcaaactaccaacgtcaattttcatttttcattttcattagaaaagactaatccaaatttgtatggaaccaaaagagcccatagagccaaagcaatcttaagctaaaagaataaagcaagaggcatcacactacctgacttcaagctatactataagcctacagtaacccaaacagcatggtactggtacaaaaacagaccatagaccaatggaacagaatagtgaacccagaaacaaagcgacacacctataaccatctgatctttgactaagtcaacaaaaataagcaatggggaaaggacttcctattcaatagatggtgctgggaaaactggctggccacatgcagaagattgaaattggacctctacttttcattatatacaaaaatcaactgacggtgaactaaaggtttaaatataagacctcatactgtaaaaaatcctagaagaaaacctaggaagtacccttttttacattggtcttggcaaagaatttatgactaagtccccaaaagccattgcaacaaaaacaaaaattgacaagtggaacttgactaagccaaagagcttctgcaaagcaaaagaaacatcaacaaagtaaacagacgaagaatgggagaaaatattcacaaaatatgcatctgacaaaggcctagtatccagaatctataagaaacttaaatcaacaaaccaaatacaaatacattcattaaaaatgggcaaagtatatgaacagacacttttttttttttttttgagatagggtcttgctcttagtccaggctgaagtgcagtggcacagtctcggctcactgcaaacttcacctcccctgctcaagcgattctccagcctcagcctcctgagtggctgtgatgacaggcgcctgacatcacggctgtattttttttagagatggggtttcaccatgtcgccctggctggtcttgaactcctgagctcaaagcgatctgcctgcctcaacttctcaaagtaatagaattacaggcatgagctaacacacccggcctgaacagacacttcttgaaagaagacatacaagcggccaacaagcatataacattttttaacaacgtaaacatttttaaatgtgcttctttttacaaactggccgagtgtggtggctcatgcctataatcccagctcctggggaggctgaggcaggaggattacttgaggccagaagttaaagaccagcctgcgcaacataacaagaccctgtctctaaaaaaaatattaaattagctgaatatggtggcattcacctgtagacccagctactcagaagattgaggcaggaggatcacttgagcccaggagtttgagactataacgaggtatgattgtgtcgctacactccagcctggatgacagagcaagcctccatctcttaaatgaaaatttcttaaaaagcaaaaacaaacaggaaaagaacgggttttggaaactctgctgttttcctttttttgtgcaatcacatgcataaccgacagtagtgccattatattagaaatattaatatatctaatcacaacacaaagcactgtgtaaaaaagccgagtatgatgaaataaattaaagataacctaaatattggacatatgtactatgttaatgaattggaggaatcaatgcggtaaaaacatcaattcttccaaaatgtattcataattttaatgcaattcctatcaaaattctacctgaaagatattctgtagatagatctgtagatctatttgtagataaacttattctaaaatttatatggtaaattataaccacactctgggacatgaatctagaggaatgaaaaatgaaaaactacatgattgttttgcagctttatttgtagtgaccaaaccctggaaacaacgaaaatatcccacagtatgtgaataaagtaactatagaacatccatgccatgaactactactcagcaataaaaggaaataagctattgatgacaacttaaatggatctcaagtacagaatgccaaaaaaaaaaaaaaagccaatctcaaaaggttacataccgaatcattgcatttatctaatattcttaaaatgacaaaattacagtgatggagaacaaattgattggtaccaggctttagggatatttagggagggtgactgttgtgactgtaaaggggtagcatgaggcaaatctctgtggtgatgaaacaggtgtttatttgtggaggttgaggttacacaaatcagtgatgaaatagaaatatgtatacatatcaatgtcagtttcctggttttgatactgaattgtagttattgtaggatactgaattgtagttattgtagttaatctttgggagaaactgggtgaagggtacatgggatctctgtatactatccccgcaaattcctgtgaatctataagtatttgaaaataacaagttaaaataaatttttaaaaattctgtgacagttattaaaaatggaaatttgagcaagttcctttattatggggctaataagacctacaagatgtagttattctgaggactaaaggagaaagataagtgattaagggacacaagaaagtactgtggtgacacagtctgaactggagttcaatttgttcggtctaaattttattttacgtgcctttcacttttccagttattgtaagcatatatttgcacctggattataaaatcttaagggaagtatatgcattccacacaatgcagaaatcattataggtgccaaataaattctgattatcaactaaggctgaatggcaattaaatgtatctcagggcattcagatctatcaggatttggtgctttagacattacccaggacacatctttgttacatttagaaccacggttgtttttagaaacatacactttagggtttctcaaagttgaccatgcattagaatcaccggtaaaacacagagtgctgtgtcccaaccccagaatttctgacttttgaggtctcgtgtcaacttgcatttctcagaagttcccacgtgatattgatgttggtttgggaccgacaagttgtattcacgccttggcctaaacaagggtttatgtttgtagaaaactcacagtgcaagatacaaagggcacttatactctgggcaatattgtacctcacagcatagagggacactgatgctaacatgcagacttagagccaaatcagccccaaaacaattttttcattttttctatgttgttttatgaaaattttgcttatatgcatatttagacaaccacactgagaggaaaggaggtgacctagggaaaagaatgttttaaattaaaattaggccttatgttttatctcatacaccttttgctggggaaaatagcaatgttatgacaataatattctaaaacacaaaatgtacaattaactattaaggtaaacatcacagtctgactcaatatttttttaatttttatctattactcattgcagtcgcaagcagttgaatgtttgacatagaaaaatgagtctgtcactttaacaaatggtacaataaaaacactcaaacaaaaattttagtagggattattataactataaaaagaatatctttctttaaaaaatgtttccaatgttttctatcaattttgggctcgcctgttgcataaaagtaataaggaacaagatgaagaagctttctattggcaaagaatgatttacatgctgaatgacataatacaactgtattcacttaatacagaaaacaagcctctattcagaaccattaaatgatcattaactcaatgtctaaaaaaatggtgttttaagaattggcaccagagaaatggaagaaagaataatttgttagtaaagaagttttagcataattcacaactgaaatttaggatttgagaaaaatttctttcctgcattataagagtattctttattttagcaggaaaacatgtcccatgagacctatacacacacacattctgccttcagaattcagctgctgcattctgctgctgcttctcttattcagactgttggcatcatcaatacataacttttgattgaatcccaaggggaaaaaataactttggtagacagtggatacataacaaatgcatggattattctgggcattcctttttatttggtagagtgaaatttttggtgttgttgagaggataaaaaaggcatttaaaagtcaattttgaatccggattttctgctctgttaataaattcacatgaaagttacagaaagtattgttatgcttttgtactgaatagtttttgtgtttagaaggctttaaaagcaagtactatgtccactgtgctattctggtttggatattaatcagaacacagttgagcattgtttgaattcacagagcttgccatgctggaagcacaaccttatatgtagtgaccatggacagtcctattatgggaaaccaacttgagagagaaggcgggtcacttgcttgtgcgcaggtcctggaatttgaaatatccgggggcctctacagaatcctggcatcagttactgtgttgactcactcagtgttgggatcactcactttccccctacaggactcagatctgggaggcaattaccttcggagaaaaacgaataggaaaaactgaagtgttactttttttaaagctgctgaagtttgttggtttctcattgtttttaagcctactggagcaataaagtttgaagaacttttaccaggttttttttatcgctgccttgatatacacttttcaaaatgctttggtgggaagaagtagaggactgttgtaagtacaaagtaactaaaaatatattttactgtggcataacgtttagtttgtgacaagctcactaattaggtagattgattttaaattatcacagtagtttgcaaagaagcataaatgttatatatactgcatatatatatgtatttattcaggaatatatatttttcattgggaaaacttttcaacagaaatggagtgtaaaagtttttctttgcgatagaactaaacacatgatttcttgattaacaaaccactgcagtaatagaatatgcagaatgtcatttgactataacagatttattttgattgctgtgagatagtttgtatatctgagttattattttgattagttgatacttccgtatttagtaacagttacataaaggttactgacctgacatatattctcaattgaactaactactgtataggaactacatggaggcctaaaagttagaaaaagtttctctgacacatcatggataaaataaagaataaaatgagttgggacggataattgaaggatgtgaaaagtattgataaagatttaattttaatgtttcttactcacatttactatttcaaatgctcttttctgtagcatatcatgataattatttcaaataatgatgtgatctatgctatcaaatgatcagatgatttcttgggtaaacgacatacaaacttgaggaactcctaattatatttagtagtaaagtcaccttgttgtttcatgtctattatgagccagcttttcagttcaattttttagtttgtctttcatatagaaatacaactatttcgtttatttttaagaaagtcatgatgactaatgaaggatttaaaaatggactgtggcacaacagtaaaaataatatatgataaggactgtgtgtcccgaagagatgggagtttatctcttccccacccatctttgacttgtggagtgtagttattctaaaatagatatgagggcaatgcctataattaagaatgaaaaaataaatctctccaaataagtaatgctccacaactactaaaaaaaaaggcagaagttttgccactgggaaaactttgtggaaataagttaacattgtccatgtattgagtcacattaaaagctaccagactttataatacaatatttacttacattgttggcttgcttcataaatttcttttggtggacatcattattacttttagattgaaaaactattatatttactatcattacaaatatatgcatggcatatatctgttgtttgcaatatacacacacatttttattttttgtttttatttctttgatatatgtaacataaataccatcaaaatcactagtgattttatatatatatatattctacataattaacatcatatacaagtatatagagcaattttgaaagaatatatgcaattctgctgaaattaagcaaggtaaatctacactctgctttgtcatagatattcaaataactttcaattcttagaatgcgaagaaaggtaatctttttgggacatgccctgtaggattttttcacgctgcatttaaaaaatcatcaagtaatgcctatgcaacatgacaatgagtttggtaagaaaaaacggagatatactcagggctatattatacattaaattttgctgtttgacaacatactgctacttggatgtttgacatttgaatccagtttgtaaatttgccgtagtttgataaacttacaaaagtacgttttgttgttttttaaccaaaacagttaccctttaaaagagatcactgtattgtcaaacatattgtattgttcacttttagaattactcaaataatgcattgtaaagaattattcaaatagtgtactgcaaatagacatttcatttgaatatatttaaatgatgtaagtcatctgaggtctaataaaatcaccttttagaatttcatctgcagaatcttttaaagacatcttaactacgaaaaagagattgctgatctaaattgatgatatactgttaatacaaagcttttggtgtatcttacatgacataacattatgaaaaatacaatagagtatgtcatatagatgttactctaaactttaaaaaaagactacaaagtgttctatgcataattacattatttaaggggaaaaaggtgttggctgacactattccagctagacagtactgaattgcaaattcatcatttgggcacagatattaatacagcttcctctttattcctatagcattcatttgaaatccctgtactccatgtcatttgctacatatgaaacaaattgtcaagtttttaaccacttgtgtagtttaataaaagagattaaaatcattgtcttggaaacatcaggtgtttttcaaaattctattttattatctttcatcaaaattttatctcaagagtaaaacaaagtcatttcccaaactttccttctccttccaccttctattgtaatattttcctaacttattaaaaatgatttatcatactttttcatcaactctttatttcatcacacatacaagaaacacagtattttggtatgagtatatatatttatatatatgcacatttatatgcattcaaatcacagggtataaagtttcctaagagggtctaattagaaattaacctttctttaaagataattttctgttcatttttctaaattttctattttaaacacacatcattttttaaggaattgacaaatgagactaatgtacattccctgtctgacaacacagaacgaaccaggaagaaaggatttatggggcctgaggttatacaattgggggtgctattttaagaaaaataatagaaaattggatacagccttgggaggggcccctcatgtaagtaaggctttaatagtttcttgggaaatcacctctgtatgaagagatgtgttgacatttaatcttttcccagttacattttaaaataaaattgatgctagttatatttctttagagcatttattatttctcaaagacaaccttttatttaatgcagattagagagttaaaagaatttataatggtaggaatttgacatttctgcctttcattctgaaaagatacattgattaaagtgatgtcaaactcagttaatggaggcggtgcagttatttgaaatatacagggtatataatttgaaggcacgccaaatcacaatgacaaggaataatgatgaccttggtttatttttatacagtacattcaggttttgattggattcagagagaggcaatggttttctttctcacaaagtcctgctatagtcctaggaggtttgtgttctgttatcaaggcagttggttcgtattggaatattttctggggaaggtcatgggctgcagtgtgggaaataaacgtttttattaaatgcaaccaggtttcatgaaaatatttccccttgtagagtgtgctcaatgcagtatactgatcttcaaaaaacaaacaaaccaagcaaataaatagtttgtagtcttcaccttttccctacgtaaaacatctattagttagacttccttggggtttcatgctataaaatattgacatatgtttggagttctgaagtttcattttaatacagatatcaaagttaaaatggcaacaccatgggataatttattattttaccaagtttggagggttttttctatttatgtcacttatagaattgtccctaaaatccttgcaaaatttcaagctccctctacttaatactaaaagtgaatgtgtcttccagagattctgataaccccttcgaatgggagagtaactctgctatttgtgaatcactcctatactaaatatagttccaagattaaaagctaaaatgattttgtttattttttcatgaaattttttcatgaaaggcttgatagtataaaaagtctgtttccctcatatattacagcatattatagcattcaatgtgccttcttaaaccagatggctcctctagagattatgaaatactttaacacccagggcatagcctttctgtttccccattcaagattacttccttgaatatggcccaacaaaaagaccaaaaaaatacatttggctccagcgttttaagggcatataaattttcttaagcacaattctgataggcagcagacaaatgagaatgaggaagggaaatggctctgctgtcttatgcttaaaagtgtcctcatatagagagaaacaacacaccctggggcctttcggagggtagagggttggaggaggaagaggatcaggaaaagcaactaatgggtactaggcttgatacctgggtgatgaaataatctgtacagcaaacccctatggcacaagtttacctatgtaacaaacctgcacttgtagccctgaacttaaaagttaaaaaaaaataaaataaaaagagtcctcatctcacggccatacaacctctacctcattcccattaaaaacacaaagatcagtactccctcttttatagctcacatcttctgtttaggctgccattttaagggataatttctattcaactctgagctcgatctttattttaatctgatatcactcgttcaaaatacttgggaatttcagtaggcaacggaacacacagagcaattttctggaggcctacaacctctgaaggtgactttgcgtagtatatgtaatgatagtaagccctgagaaaaccaatgttcttagtagtctggatttggtttagaaatcaatgtattcctgctttcttttgtgatcttttgccttctccctcaatgcctcactttcactctgtcattatgaaccccattcctcactaatgggaactgggggagaatggacaatgatcctttaattgaaatggagttgtcatttccttgccatgctgataaaatgttgttgctgttgttgtttgttgttgttcttaaatgactctttcagaatttttaactcagtattttgattacataccattttaagaaaataattgtccataaattaaaaatgctagcaaattgatgaattgattttctcatgccaatttggaaatctgaaatatatctaagactggtgaataatatgtaggtctaattgccatttgaataaaagaatctgaggaagagctttgcctttatttttgtttattattcattttagtttagttatttattttagtagaaaaatgtggttgtgtcaacgaagaggaggtacattaaaatgcattattaaagccaatgcttatccatgtaatgaaatgagaatgtagatggcttaatgggttttggagaggattaagataattttaaagaaacttcaaaaaatcagatgctcgaatcatgatgttttttgtttatatttaataaatatgaaaaccatacatgggcatatcaacaatgaggaattcacatatatatcacgaagtctcttgctaatttgtcaacttttaaatgtgttgtcttcactatcatgaaaattttgatttttaaaaaaggtcagtgttagctgagcacaattaccattacggtgtcccatattatttccaattatgggcaaataaaatgcttaccctttaaatgtttttaccctcttcttggcttttgttttgttttgttttaaagcgttctcccttcttccactctgcttttggctaagactgtcatggaatcaggactataaaagggcataaacatcagtagcttttttctcattcctggcactcatctttatttgcactcaacttgtctcttcctttatcagattacggttgcaatagtaccttagcctgagctaagtgctgacttaaagggcaagggagtcagtacactgttacaagtgcagattttagccttggaagctgtgtgaggaaaaattaaagaaataagaaagaaaaatcacaaaatcagaatggcccacgtattttcatcaaaggcaaattgagtaattcctttttatgttggtgcttaagaacgatgtattagaaataaattggtgactaagtgaacaaaatattaataaactagttgagtaagtgaaaaaataataatctgtaaaaatgatgaatcccaatgactcacatgttgcaaaataactaggaagcaaaagggaaattagactttaaagagcgtaatcagatgcaagaaatgttggcttgtaggtggttaactaaaatcgcttacgggaagctcagacagctggggaatcctgatttagtagacgctgaagggcagggcatgagccatgtgaacagctgctgaagagctagaggattcctttggattaggtgtacacaccccgtctctaatgggctgtcagagagcaccaagtgttatcacagaggttcactttgctcaagcctatggcttttgcagtgttttactttaaatgtctgaaaatggattggctctcaaaataaatccaaaaataaaagtatcaaaataagtgactctctaaaacttgtattgtgtggttttgggtgaccacagtttaaagaagggacttacagctgatgatttgttatccatttattgattcatttgtccatgtaacaaatacacatattgagtgcccattttgtgccaggtactgtgctatgctctggcgatagtattctaaacaagtgaactcaaagagagactagcatttcaaggaggatgtgcatattaaatacacacacacgcaaactacttgcattggagataagggctatagaataaagcacacattgtaataagaatgtataatagggagagttagaccagtcttcgaaattggggaaatacttctgagaaaaaaaaaatattcaaagcaaggcaaagaagaatgaggttagagtatagttgtccaaaagaaaagagggagcaaaaatgtccctgtcagagggagcaatgtttctgaatgtggaaaatggtatggagaaagatctaaaacaagtacagctttcctagagtacagtgagggcagaaaagtgtggaacaagcttgcatctgaatggccgactggggtccaatcattcagagccttgaaggttatagaaattatttttctctttatactaagatcaatggacagccttatgggtttcaggtagaaaactgatgtaaacatatttgtattttttaagactatcactctgttttgtgtgaaagagattggcaagtgcctagggtagatgaaggactatcaatctgaagcaattacggtagctcatccaaaagaaggtgatttggactagaatggggacagtggagatgaaagaagtaaatctattcaagatttgtatatgagatagaatcaataggaattggtgttgtattgcatgctgtgtgctccatgaaatgcacacctgggtggataatggtgccatttgcaaggagattggaagggaaattggaacaacaggaaggattaggggtgtggatgctaaggtgtttgttttgttttgtatttttatgtagcgcgtgggtattgtgcctagaaatgaagtcattattagggatttaaatatgcaactcatggagtggatgagaccagctagaaagataatagagtgtgaagaggagatcggaaattcaataaagaagacaaaagcactaaaaaaaaaaaatcagagaagacacatctagaaaaaatgatgaaattctaaggaaaataatatttccataaagaggtctgttcctttcgatctccaatttaatgacttcatgaatgaggatcccacttttagcattaggtgtcttggtttccacagtctctaccatctatttacccctaatttcctcccatattgctatttctgtgaatattaccaaaatgttgccttagtagaaaagcttcaataaatatttaaattgtataacgtattcagctttttcctgtactctgcacttcctaaaaataccttcttcggaaaccccatttcaactgactactgtataatgaaatgagccttcagtgtaaaacatttatcatagtctcaatttcaattgctcagtcagaattgttgagtaatatgaaaaatcatcctttagagaatacagaattgcatagttatgacaaggtaagtttgcactttatttaatgctagtttagttaatatagatgcttattggagaaatgtctaaaaattctggaggaccgttagtgaaagtgattatcccaatatctgcaaaaatggtaaaaatacctagaaaacattgacatttcagtttaaataaagccagaatcacaataaagagatagaaggcatttgagtaattcaatctaatcatggatgaatgtaatgtacttatcagttagctttggaggaagtaagactcgatagaatagtaatatgatattgagcaactttttttaacattaggtttttaattgcttataactcaacattgttgaacacctatgttctctttgctttttatgagacagcaactctaagtcagagaacagatacacacacatatgtatatgcgtacaactactataaaatatcaagaaagttataaagcatggtacaaatcaatcataaatgattacttatgaatagtgtgattatggacattctcattgaagaatccatttttataaataggcataagagtatggacatacagagatgtgaattagagaatgattgcaagaagcagtgaggcaaaaaggattaatgaaacattgatctgtcttacatacacagctattgacagtaccttgtgtgtgcatagcactattctagattcacctaatcttcaatgataatactgtatttaccatttaacaagcctgtaataagtgtcaggcacttctctgattacatcacatacatatgtgataagttccatattaactctagaaggtggggaaacataatcatctaaatttaccagatgaatatgtagaggtacagggagattaagtaatttgcttaaggtagctcagctggtacgtggtagagtcaggattttaatggtggcagcatgacagtaggattaaagattcttaaccagtcagttgtcacgatctctcagattttaatagaattctaaaaaggatagaacaaaatataaaatggcaggaatcatagtatcttctaacaagaactagacatgtcccattgaggatgctctttaaaaataaaacccattaaaattttgggttgtttactcaaagcctatagacattggcatattatattttcttagataaaaactgagatatcctaaataactcatgcccattctctagacttgcatagggagctgtctatgataatatccataacagttatcttgtttcacaattttattactatctcactcttcttactttgtgaagatgaaaaagatcaaaaataaaactaatgcagccctggtttgtttgtaatcatctacagttagccatccttagagtggtctcactagttgttcttttagagtttatttcagttatgtacaggcaactgtgctacatgaacaaaaagctaagaactgggctaacctgaacatgatttagtattgtaaaaaaatggtttacatagattaacgtgccatactattctgaatagtacttggcataaacagtaggttatttaagttactataattactgttgcctttttacataaactaatttttctcttatcttcattatgttagtcatccacagtgtgatatttagttgcatacattcatatagtgtacactgtacaattctagagtgtaccagtaacgtggactattaatattatgctatgaggtaaatgacacccctggagttaagcaatgtgcactctgtacgataacgtcaacattggcattctcatatatatgattagaaataatactgagtttctctgacttcacaagcaattttattctctcatctcataaagaggtaatgaatgcacacatatctacatatttaaaaataatgtcagagatcgtgatggaacagaattattcaagatgtataaatgagggtgggaggcaaagggaagtcagaaatactccccaataatttatttcaaattaaaagcctattggttattggctggtcgcggtggctcatgcctgtaatcccaacactttgggaggccaaggcgggcagatcacctgaggtcaggaattccagaccagcctggccaacatggtgaaaccacatctctactaaaatacaaaaattagccagacgtggtggcgtgcacctgtaatcccagctactcaggaggctgtggcaggagaatcacttgagcccgggaggtggaagttgcagtgagcggagatctcgccactgtactccagcctgggtgaaagagtgagactctgtctcaaaaaaaaaaaaaaaaaaaaaaaagtctattgattatcatgtgcgtttccatggtatcaattgtttagtattgtccagtaactaactagtatataaaactatcaggataatataaattttaacatttatttaaaatgcatcttcttaactgtaaggttattgatctttggataagctatagaaataagccttaattcagaaatatatttcggagacccagtaggttaatttgtagcactactctttaatattaaatatacaaatatacattgtttttataacttactgctataatgacactaagatgtgtgattatataaaaataagaaattgttagaatttattttattttaatcaatgctgatccatttttctagtgtatgagattagatgaggttgtatgagataccacttttctaggaaaaaagaaagtctttatgacagtgtgatgaatgaagtaaattagctcatttctttcaatattactagtgtgcatagatcttctctttttgtctttctgtctatcatacatacacagaggcacacatacatacacattacttggaaattaagtggtttacgtatgaaagtttttggctttactgataagatcagtaacatgataaataatacaacactgaatacatttttccatttgaaaagtgtaaagaacactacaacacggttgggaaaaaaaaacaacttattatattcaaatgtcattcccaattgtaacaaacatataattatttatttcttaattaagaagctattaataatagtactttaatattcaacattagcagtaactttgttggtttcttttttgataatttgtttaagaaaattagattataaattctgttatggtaaaaatacaaaaataaagcaaagtattatcttctttctatctcttatatgcatcagttggacaagatattgagattctcttttcttttaattgcatgctttcattatttttctattcaagcttcaccctgctaagttcaagtgaagtagaggacttcatgtctctagaaccaattaatgaaatttcttcgtctttcttgaacttgcagaaggtcaatagtgaccattttctcccttcttaaaaatgttgtcgtctttaagatctgtgcactgtcctctcatggcttcactactactttggagggtgtttgtattcagtctgcattgcaggctgatcctctcttctcagcctttaaaaattaggtttccttgggatctagtcctagcataattctcttctcataatgatctcttcctcgatcattgcacttatgtccacagctttattaacacttatatacagataactaaccaagttatacctctagcttagatttctccaatgaattccagaactgtgatttcaactgcctgggtggcatctccattcttatgtgatagtcacctccctctaaatgccctaaacagaactttctcttcaccgcacaaaacctgcttccttctcattgtttttcttatcattgaatggtgcaaccattcacccagtttcacaagccagaaacatatctcatccttgaaactctgatcttttttacccagttatttctaagtcattgccagtcactgtgggttttatcctctaatatattttcatccacttctctttatctcctctaccatcatcctagcgcaatatattttctctcactaggaatacagcagcctttcctttccagtttctctgcattctctttcgtattcttgataatccactctctaaacttcatgcagccaattaaattcgaagataccaccacttgttaaatcatgttagtagtttctcttggttgctaggaaagccaaacaaaacaaaacaaaacacatttaaaaatcaaagtctagacactgcctacctctcctatctcatttcccatcatgtttcctttgcctcgcccccttactggctttctttttgttccctgactaggtatagctttttttttttatctacagtacttttgtgtatgcttttctatttgtctagaacctccccgtttccccttttttaccttgatgacaccattttccacctacaagcttacctctggatagacatcaaaatcccctaagtacatcaaattcctctaccacgtaacatctgttcataacacatagcactgttatgattccatatgtatgtacgtgactaattaatacttgccagtcggattatgtggtaagttctatgaaccaagacacctcaactgttcttgctcaccactttattacctggaaccaaacacattaggtttccccatatatatttttaaataagttacttgatgtgtaatgctttaatgaacataattacagatgtttacatataatatgttataataatgatattttgattgcattttatgaaaattttatatgacaaagcactttcattttggttaaagcttcatatataaatatataataaagatttgctttttgtcattgggtgctgttcccttttttgatttcccatactgcttttcacttgtggttcttgattttgttttttactgtttttaacccatgtcctttttctttccttaatctatctttgtaaagtctcaaagaactagtatctagaatatataaatatcactcaaaactgagcactaaaaccacaaataatctagtggaaaaaaatgtgggaaaagccttaatagacatttcactgaagaggatatacagatggtaaagaaatgcataaaaagatgttcagcttcactagccattaaagaaatgcaaattaacactacaatgagttatcactatacacctatcagaatggctaaaattaaaaaaagaaaaacagtgacaacactgaaagctaacagggatgcaaaggaactgggtctttctaatattgctgatgggaatgtaaaatggtacaaccattctagaaaacagtttaggagtttcttctaaaattaaacatgcagtcaccatacagcccagcaattgtactcttgatatttatcccagaaaattgatgtttatgttcacccaaaaaccttgacatgaatgcagtagctagaaacaagaaacagctcaagtatccatcaatgagtgactgttaaacaaactgttatatactcataccactaaatactacacaacaatttaaaggaatgaactactgatactcaatattcacaactccaatggatgtcaagagcaccatattgagcaaaaaaaagtcaaaggttaaatactgtgttatttcttgtatataacattactgaaatataattatagatattaagaacagatattgatattaagaacagatattggttgccagaggtcaggaataaggcagagggtatgctatataatggtgccacaatggagccttgtggtgatggacctgctcaatattttgattgtggtgtttgttacacaaagctacacttgataatgtcgaatagagcttcacacacaaacacacacacacacacaccagagtcacacaagtgcatacttgtctatctggtaaagcccgaataagctctatgaattatagcaataatttcccagtttttatattgtactatagttatacatggtatcaacattgggagaggtaaagtgaagtttgcacaagacattgttgcatatttctttgcgacttcctgtgagtctataatgattgcaaaataaaaatttgaaaaatacagcattagacctttaataagctcttggttttctgaaggctagggtatcatcaccaaacctaatcgaggataagtcttgtaaattaataagtctatcactcaaggtacaaaggatggtttaatgctaatctgctagaatgcaatccatttctattatatgggaacgtgcatcactgattgaataaaatatcatgatgatggaggccgtattctatatgtcctactttgtaaggtgttgtgtttcaggttgtttatgaccaaaaaccctatatgacaagcgctagaagttatgctggtccacgggcatggtaacttgacaatgcctgagactacctgggttttaaacttgcctctacctacaaaggcaagtaatcctggacaagccaatatttatttaactagtattaattgagagcctaccatatttctggcactgagctgagcatgtctactactgtcctcaagaggaaattaggaaaaataatgccccttcacaagcttacttattgttggctttaaaagggggatatataaagtttcttggtgagggtcaaagtgttgagaataatttttctttgtattattttaactattattgttaatcacaaataactaatgtatataactctaaaagataaatgtacatttggataccaacttgtataaacagatacatagatcaaaagactacctctgattttatgtttgtgcgtgtgtgaatgatctccttgctttcaatctggtcttcagaaaatcccaccttgtaattgctgcccccgttgagtttctaaaacaaataagattgtgtgcctccagcttaacgtcctttagagaatcttctagcttcagggtaaaatccaaggtcctaacgtacaaggtctttcacagtatggcatctgctcatgtctctcacctcctgatctgctgttccccaccaggaacacttctgtctagatataaaattactttggttcagcaaataaaataactttggttcatgtaattttgtgtctatgacttgttcccacttcttggaatgttctcccaaaaaccactatcaccatgtctcttccaccaatgactattaatattatttttatctttccttatagaatattgtttaaaagaattccttactaccctaggtcagaaaatggggccccaatatgtattcttattgtaaactcactatggataattctagacaagcaattatatcccctattttagctgtcagtttgcttctcggcttctgactcactctcttgctccttgaggagatagcctgtgcttattatatgtggattaattgtgcctaacagcttgtaggtacacaaatgaatgactacacagcatttatctgactattgtttagccattacatcactgtatacatatttgaaactcaggcatcattcagattggaaaagccttatgaatactggcatgcattattttgtacacacacacacacacacacacacacacacacacaaaatagaacaggatgggataatcctaagtagatacttttttgtccagtgtactcaatatattgtaaaaattataaatcttagactaaaatgttggttgcttaatttggatgattcatataatctgtcgtgtttttggttatctgtgtactttgttttctctttctttcttagtctcaaaggaaatgtccaagttaaaaaagagccccaatttgtggggattcctttgaggagttacaaagctgagatatcttaggagatgccaaattgatgcaaagtggtggagaggtgagcagagtagaaatttggagaatcacttctgctcctatagtgcatgcatgccagggctgctgtcctttgaggtgggcacaggagctctaagtccagtgggtgtctgaggacagattactgagaaagtgaatggttggcttggactacctcaaagacaagtgtttgctcctgcttgagctattgttggaggtttcctgaaggagacttagaacggaatgtccattccagagagtattcagtttcagtttgctgcattcctaagcttattttccaccctgggagctggccacaatgattggaaatctttcatctgttttaatctgggattgagctcatttataaaaggaaacttagtgtctggataaatatgtgtgcacaagcatggagccccatacaagtatgcccaaattcaaggtgagaaatgtttattgcatgactcaaatacatggaattgaatggactctgaaaacaaaaataggatctacagagccagtctaacaacctattcatatttattatttttgcacttaaatgtttgtaatattttattgaccagtgaatatgaactatattttgtatattacgttaacatattattcatgtaataatgaatttttaaaaactggtgtcttgaaccctttcaatttccaaagtattacagaaatccacagatctggtatgcacaggcattttatgagaaaacttagcttgagtgatatcattaatttactgaagtagtaggccctctgacctgcttttataataaaattaagtttctgtaaactaataagaccatagtaactttttctttaatattttatctttgaggagatttgttaaagaggcttgtatgtgacatgacaatctattttgacttataaaatttcaaccaaagaaaagatgcgatatagtatctttgttcttatctatgacaatttttatgatgatagttccataattaaattttttcttaatgaaagtgtatattattgtattatcttcaactaaattagatcatataacccaattttgatctccgtatgccaaaagcagagaattgaccagccagaaaaccatccaggccttatataatatattgtgcctagatgaaagcttataagcattcttctgcctggggctcacattgtagaaatgtggtgtgcaattttgaaagttgaaaatatagactctgattgagaaatggaaaagagtagagttctaattcatgacatctagaaatcaagttctaccactgaaaaattaatttgcatatattcattatcttttatagtgaatgataatgataataaagacaataaagataatatacatataattggttttataaaaactatggcaaaaaatatattaccattctcacttgtcagatgaggtaactgagtctatattatttgaaatataactttaaaaattatattatctccgctactagattatatactcctggatgccgcaaaccacatcttctatgtgtttatattctcatagagttttgaatatttccttgtactaggaagaagttttataaatgtgttttgaattaattaatatccaaaagtgatggaaagaattataagttacttataaatttcttttgtttcaaaccattagatgatgacacttaattttttgggtataatatgatatggaaagactctcagataacttcaaaaactagaattatgcatacatacactcagatttctaaaaataacatgctatcaattcatcctgcctgccaggtatacaattcatttgagttttgcatgcgcgtttcaattgttcacattaaactgtattcatagatacaaattcacttttggaatcttgggtacttaaacaaaaacatagcctttctaatagaagtataaaaaggatactaattgatgaatataccaagtatctttccaattgcaggaaaccattaaaattgtgtctatacactgtatctcttttatcaaagactgtaacaaaatcaattgctatacatattgaaatatttatgtatctggtatgattacattagcttcagagtggttccaaatttaaattcccattggagaaaaatggagtgagaaatttgtacataagagagaagaaatgttttcttttttttgagacagagtctcgctctgttgcccaggctggaatgcagttgtgtgatctcggctcactgcaaccttcacctcctgagttcaagcgattctcctgtctcagcctcctgagtaactgggattacaggcgggtcccaccatgcccgcctaatttttatatttttagtagagacggggttttgccatgttggccaggctggtcttgaacttctgacctcaggtgatctgcccacctcagcctcccaaagtgctgggtttataggtgtgagccaccacacccagccgagagaagaaattttacagttagaatttatttggacacattttagaaatttttttcctgtaaaactcaagtttcatagtgtgtacgtgaatgcatctgtgtgagtgaacacctgtgtatttgtgtgctataaaaagatgaacacaggaatctaatagcataagtcgcaaggtaagagtattgtccaactaaaatagctaacttcagaggtatgaattactttttgttggtgggtatgattttaacattcccttgaatttattattgtaatatttgccactaaaagaaaaaaatcatggcttagaaataaatttaaagtaaccaagatcattgctatataaaccagaatttaaattgagggtttttgaaccattagggtatatttcccctctggcttaaatttgaaaactgatgaaattttagatctcagcacatttaatatgtctaaacaatactcatttgactgcaaaacctgtatatgtaatttccaaggcccagaagttcagtatttgaaattaaattgttgcatattactgagaaatattatcttaaagcatctgctccttctgctgttctaagttaggtgtgtatttctcgttagtgctcagtcgatgagtacaaataggcatgcagcatgagagcagagcattcatttcattgactgcaattactaacatgatttttgacatcttattcattgggagagtgtcttttaatgttaatttgaatgaatgggaatactttcacattcttaatgaatctgctcatagagtaaaataaaacatgactgttatgctttgaagatcaagaatcttcttttacacaaaagggtaaaaaaggccaaagaaggtgaagtgacactcttcatgctagttccaacacgagtattttgatgaacaagaaaaaaagccttctttagatgtaggtgaactgggtgatttggcattccttcctctgaattcccagggtattttgcctgtttttctttaactgcatgcaattcttgtcctttatccactgtttacaggtctgtttctcacaataggcggtgagtttatttacacagtgactgctgttacatatcacatgtactaagtctctagtgattgttgcttaacgatgactgaattgataggtcctagcatggctgatctctcacattattcttgtttggtttgggtttgggtatgaatggtggaaagagaaatggctggctctgagcaacatattacaatgggtttctagcatctactcctcacctagtactagcttagacagtgagcaaaataaaaccataaagcaggccaggcatggtggctcatgcaagtaatcccaacactttgggaggccaaggcgggaagatcacttgaggccaggagttcgagaccagcctggccaacatggtgtaaccccgtctctactaaaaagacaaacattagctggacgtggtggtgcacacgtgtaatcccagctgcttgggaggctgaggcagaagaatccgttgaacccaggaggcagaggttgcagtgagccaagttcgtgccactgcactccagcctaggtgacagagcgagactctatctcaaaaaaaacgaaaaaaaagtaaaagtaaaaaagctaagaaagcaaactatgtgttgtcaagaagtgtttatttttgcatcttgaatttttaaaggaggaggttcagatctatttgttagatgacacagggtttgtgaaaactcttgcagaccaatgaaatcagaacatacaggcacaccaagtgcagattgtgtttagagccactgttctaaaagcaggtgtaagagggttgcagttatatcccagataagagccttagggcattaggaatgaaaaagacaaaatgcaaacaaaagatatttagatatttaattagtaaaacttatttgcgcgggtaatgaggagagagacaaaaatagtagagagcaaatcatcaatactgacttcctgatttcttactagggcagtataggtgtacactatatatatatatataatattatatattatatatatatatataatattatatattatatatatatataatattatatattatatatatatataatattatatatataatattatatattatataatatataatattatatattatatatatatatataatattatatattatatattagtactacttccttttataaattggacagaaagcttatatgtatagaaagaaagatcaggctgggcgcggtggctcacgcctgtaatcccagcactttgggaggccgaggcgggtggatcatgaggtcaggagatcgagaccatcctggctaacaaggtgaaaccccgtctctactaaaaatacaaaaaattagccgggcgcggtggcgggcgcctgtggtcccagctactcgggaggctgaggcaggagaatggcgtgaacccgggaagcggagcttgcagtgagccgagattgcgccactgcagtccgcagtccggcctgggcgacagagcgagactccgtctcaaaaaaaaaaaaaaaaaaaaaaagaaagaaagatcaatattttttcaaatgtccagccaattgtttaagtaagttaaggtatgtaatctaaacttataatttaagtttaaagaaaaacattagaccaaatatttagccattttgatgtagccaagtttatgcttcaggagagttgcatagttatgaattgagctcacagaaatacaaatacacacgtcatcatagtgtgatatccagcatagatggggggcagttatcataaatcctgtcctaggctgggtttggaatgtgagacagattttataataataatatttcatctacataaaacagtccatttcctggactataaggatcatgataccatttgtttatcatggctacaaacagaacaggaagtagtatccttcaacagagaagataaattataacagtcattatttagaatatttgcaattcctttgtgtagggctattctttgttagctgaaataaagctctctgccttgattacagttatcattttgtgaaaatattgaatgagtttagattcctaaaggaaattagaagttgagtaaaatgtacattcacttagaaatttccttgcagtgaaagatgctgattactataaatgaagacagggaaatttcattcatttaaagagattactacaggtgacaagtttaaaattagccttaacttaaaagttggaaaatattttttcctgctagagactaatgccaactccgtgatgtatgtaaggtcatgttatcaggacccagcttattgctgctacctcctctcctacccttctcctcatctcttactcctaaccctttagccaaaggctcctatgtgcgggcccccaaactaccatgctttcgtgttgtcagggataagtcttcctgaaattaccctccttctccttaccaatcacttaattaattaaagcctggtttccacttcatctcaggaaaaattatttcctaacccctctcaccaatctccattgactccgccaatggaggttaggtatggttttaaagtgttctcatagcataagttcatcaaaatgcacaatatctttcaccatattttgtcaatttatttactttaatatgagaatacaaatatcttggcatgtttatcagtgttacacggatactgttattttatcatcatgtttcccacctctcccccatacctagagatgagcataaggcttaatatataaagttatttggttaatgctttttttgaataaacaaatacatatctaagggcatgtgagcaacagagttcattgtaacactatgcttacagttaatcatctttttgttattgttctagcagcaagaaggatatatatctatatatatatacaaaggggagaatgagaatgatctgaattcaaatataaaacattacaaatgaataaggaatgtattattttgctagcattgccataacaaaataccacagtagactgggtttcttaaacagaaatttattttctccacagtagtaaaggctaggtataatcagggctgatttcttctgaagcctccctccttagtttgcagaggctgccctctccatctgtcttctcatggtctttcctctgttcctgtctgtgttctaatctcatctttttataaggatactaatcagattggattagagctcaccttagtgacctcatttaaccttaaatacctctttaaagaccctatctccaactacagtcacattctgagacaatgggggttaggacttcaacagacgaatttgggaaaggggcaatttagcccataacaaggagccctgtcaaataaaacagctttgagagcaaacaaaaattggcatctgagtgaaatatgtgggaagaggaaaataacttggggctttgctgttctcttcccactcttcctgtgacccgactggttccctgggaaatggtctttggatccccactgctgcttaagagtctgttttttttcccctgagttactgaggactgctgtcagtatgattgtagtgcaaattgatcctttgtgggaagtacaatagcaactggtaaccacaaagtaccagagggcaaaagaactgtagacgggtaaataaaaggtgtccgaaaagagcaaagggctggaagaatgggaaaatggagaaagtaagatatgcattgagaagactgatgattttttaaaatagtagatgttagatagatgatgagagagacagagagagagagagagagagagatggttaaaggaaaactggtatttggtctgcagttttgctgtttcaccagcttaacaccctacagtgaataacaaggtcatagatcatcacaactgcagaaaacctggagaatattttccatttcctcattatatagatgtggaaagtgagactccagttctcagaaacagttagatacaaaactaagacccagctagttctcagccagtgattttcatatcataccacacgctatacagttgtaggtttagaaaaaatctatggtataagaggaccatgtagtaccttacaatgcttctgtaatacccacagcatcataaagagtaataaatttaattattgcaacttaatgattcaacaattgtatatgtatatacgtaattatacatatatatgtgtatgtataaaatctaccaatacatatgtaatgcacatgtataaaatctaccaattttctatatatgcagaaaacaacaacaacaaacagtattagagaaaaccagggaattaagtcaaaatcatcactcccagacctgaaataaatttcaaaagctcttcgttactggtcctttatttgtccttcctacctcattttttgccccactcatataccacacattgcaactatgctaaactaccttattttttttagaaaaggacatcctcctcatacctacatttgtacatttcctttttatttgcttttttcctctcctgttgccacagtaaattcctaagttttctctttaaggatctgtggcctgctttggatacagttgagtgtagtgatattgtgccttgcacatatctctagaacaaaagttattctgttatagaaattacttatttactatcacttaagatcatttattaccatttactatcatactctaattcacagaaggcaaaaaataaacccttgaatggcaagaaatgtttaggcaatgttgggcaaattgtttatgaatagtgattgcaattaacatagagcttcatacttactggattaaatattgatacttttgagtcatatctctactcttagcaataatattggtgaatattctgtgctgtaagcaatgtaaatcataaaaacattctaatgtgtatatgggtattgaatattcaatgatattaaatcaatgttcaattcatatagatgattcttttggaaattaagaaatggatcccattttaatgagttttccccaacataaactatactttgttaagttcaacttgacaatttacaacgctcacatagctttcagatgtatacttaagatatatggaaatgaaaagcaaaatgttgtgaacaggaggtgacaagatattttaaatttaatcatcatatcttttataattaaccttttaaaacatttaattggcattattgttagaaaactttagctctggaagctaaatctttagaattgttgacttgtagacaagtcaaatatccaaaataaaatttcacccatcattagcagtagatgtatctagggtgaaattacacgctggattacttcaatattcttatatttacatttttatttttttcaaagtttctccagtgagcattttattgtgaaaatattaattatattttaaacttatttttagtttaagatgagaagatagtctttggggtagataaatacttttaaatctttcatttagaagttcctggactaatattatccaggtcccacttccttaaaaaaacctaatgtaacctttcccatataagcattgactgctatttcttgtttcacaacatttatgtggtatgtctatgcctatggtattgaatatatatttgaactctgctggcctattcccatctctcacagatcccaagacaatagagatcatgtcttacccatctttgtatctcttacagaaaatagatctcaaattctacagaagatattgaattgagagtttgagatgttagaataagaaaaggcagtgaaaggagagcctacatgtagcctaggccagatttacaaaagcagtagctcagaatgagatagggattcaacaaggagaaccaaattatttggtagtaagttgttgctaaattgtgggagatgaggaaaagggaataatgatagcagactccctgatattaatcccccaagagtgctctatggcacagtaattattcattatgggccccctctgtttggccccacgcccccaaaaaagacttctttagtcataaaactgaggggaatactacatactaaatccccttagagtttctcaatgtaatgcatatgcaaagatgctctggaatcctgcaggaaagacagctgtttaacttttaacctagtttcccaaactcatttcaccatggaacttctttaacatgcagtcaataaatgcccatttatctaatgtttaatgaagcatatgttggaattcttaaaattgttaatagctaatcaccgtgaggaactggtgagatgatggtaacattaacagaagtagagaaaccaggaataggatcaaaattggaggggaaggggaaaagggccttttgttttgagacatcaacttagaattgttgatgggctatccaggtgggtagataataaaagtttttgtgggggaggactaaaactaaagagttagacttaagagagaaatacttgagaatcacttacatggagatagatgatagttgaagttaaagaagagaacgagatttctaacggagggaatacactatcaaggaaaggattagagaaccctgggggagtgtgaatatttgtgcctcatttaattttcagaaccagatcatgaggaaagaatacttcccattttagagattaaaaaacaaaaccgaagcacagtgcttaagtaactttctcaaggccatataactaataagtggcagatatgagattttgagccctactctaaaacttgctcctcaatttgaatgtttacatatttatgtaaataatatattttacaatattaaaaacgtttttgtagagatacaataaccatataattttacaggattgtcttttttatttacgtttttctttggagtataatacatttttaattattggcctgagaagaagatacaatagattatttttggcaaatggtgcactcattcatgagagacactgtattttctaaagcaggctgatctctgcataatactggctccctgaaaataaatccttgctgggccgggcgcggtggctcacatctgtaatcccagcactttgggaggccgaggtgggagcatcacgaggtcaggagttcgagaccagcctgaccaacatggtgaaaccccatctctagtaaaaatacaaaaattagccgggcgtggtggtgcatgcctgtaatcccagctactcaggaggctgaggcaggagaatcgcttgaacccaggaggtggaggttgcggtgagccaagatcgtgccatggcactccagcctgggcgacagagcgagactctgtctcaaaaaaaaaaaaaaaaaaaaagaaagaaaaaataaatccttgcaatttatctgccatattgaatttgttctggaataatggggataaaatcaaaataggaaataaagtatcaattttattccactattattttatttattattttcatcttagtcatatggaattatatttataggaacatgttaaaatgcattttcaagataattattgcacacaatttaaacaattgttttgagtgactttttgtagaggtagaacagttctgtaaaattaaggtttggctttgctttgtttgacctagattccctattaatttcaaaataaatgtgccttatatttcaaaatcggatttcgtatatgaaagctcatgtcagttcacaacaaaaaaaaatcattaaaaaagaatagtgcgttattttattactgttttgatagcaatacctgaggataccgtaaatgtgtgcatgtacttttgtttacaaataaaaaacagttatgagaagacaaaaaaatctaatgtagaataatttattccactaaaacccagctttcctcatggaaatcatgcaacacctagtgagattatgctagcacatagggaaatttcacaaatgcacattcttagacatattaaccttctggatcagcattcaacaaaggtaaaataatgtacgctattgatatcagactccttagctccctattctggctcccttttaactatcaaaacacagtaatctgtgttttccttctttgtacatcagttattgtacctgccactctttataagcattcacttttctcttgtttttaagcacagtggtagcaatggccatgacttagaggcttaatgaaatgaaggacagattataaacaaattaaacccacactgctttctttatagaagcagctgcagagtgttctgaggtttttttttttccttgttgagtaaaggaactaataaggaaaatttcatggcttcaaggtctagagataagaaatgaaagttgtaacaggagaggagctgggaaaagcacagaaatgtagatttcgcggatcatgatgaaagccacaggtgacttggtgaccacagaaatgagaacacagggttgggtgtctaggcaggaagttgggaggctggtggagtcctggttcaactctaaagtctcagttatctcagcacatgctcttgtggtgctgctgagatttggctgattgcctaccccaaacctaaaaatagccgagcctcattcttttgtagtggcagccagaggcgcagctgtgtggggactggctatctttttccttagctttgacaaatagctgagagttggtgggcttgagtgtgcacctgttgagacagaaagtgctgagtttagttgacaacactgctgaaggtaatttcacactttcattccaattgatcaccgaaacttagaaaaattttctccttttctaaatccttctccttgcccatgaatatatacatacatatatttttctcgaactgtttgagagtgattgttaccaaaggcaattgtttttaaatcagaataacaaatctcctgtttgagtggctaactcaaattttattttcttatttaatttagtagaatttaaaagatttaaaatagttttgaaattaggaaataatatttttattcccataagtctaaaggtacaatctagcccattacatcactataaaaaatcatctccatatttattagattacaggatattccgctttaaactagaatttgcgttgcatacatttttgcagaaaaactcattcttaattttttctaaaacagtagattggatatgtgttaaaggttcatgttctagtacttctttaaatgcttattgtcagctttataaaatcattttatcacaaaaagttagttttctgtaggcttattttccttgataggattccttctcttacaaactggttatatgaattaaaatgtaaatgttagtgaattgtcatatcttgtaaatatactagggtagaactgatatctttatgcaaattagaaaaatattttacagtatcagttatggagttttttttctactcttcctttttctttgttaatattggcatgtgatgaaatcactactttataagtttgctactttgattaagactcagaaatcagagtggctgggtgtggtggctcatgcctataatgccagtactttgggaggccaaggagagagaggatcccttgagcccaggagttcaagaccaccctggacaacagagtgagacctcatctctacaaaaaaaaaatgaaaagaaatgagccaggcatagtgacaacacgcctatagtcccacctactcaggaggctgaggcaggaggatcactggagcctaggaggtcaaggctacagtgagtcatgatctcaccattgcattccaacttgggcaacagagcaagattatgtctcaaaagaaacagatcaatcagagaagtaactttaaatattttaatataaaaaaaggcaacatctcttagcaaataaaaatagcgacgtccttctctttctgtaaatctatccaagacatgagtgctgttatcgattcggtttagggttttgttttgtaatatttttttcccctttcacagcaatacattttggggtatggtttgctgacaatattttccacagtaatcagtggcttagctgtaaatagaggataagtattgcatctggggaatacacattagaaacaattggtatttctggttcatataaaggtggaaaaatacttggccagatgggcacttatttatttattttcctgaccagaaataacaggcaatgtgtgagaaagtgtggaaagcactgggttggccgtcaaaagcaggatcttacaaaggttgaaggaagctaatctgctgagaggttttctttttttaatgactttcacatagtatttttcaaagcctctgtgcattaacactcacgccaaaggaaatgatttgttttttcaagcacttggtcagtgcaatagctccgcagctaataatgacatatggcaaattttgagtacttactttgtgctacgtactgtaataagagctttgtgtatattatgtgagtaaatacttaggacaagcctgtgagagagctattattgttcccattttacagatgaagaattctgagttagaattagactttgaaagtcaaactttctccttccctatcccttgctgttatccaccacatcatgctacctccctgagctcagtgattacctacaatgaggtttaccagcttgtcctatagttacctgtgttataactgccatgttcctgaaataaattaactataaaatggtgcccatcgactgatatagagaccagtcattttttttttatagttttatctggcctggggttatcaagatactaggtttaatagaacttacttccagatttaaatgtctttgttcattcatgaaaatcaattgattggatccaatgattttagatctagacaactgtcagtcatgtaatctaactaactcattgtttaaagaggcaactgaggtgctgaaactttcaataattggattaattttatctttagtcagttatatcattagaacctaggtctctatttcttaatctcaaccaaaatatacatacatacatatatgtgtgtatgtaagcaccatttctgctaatttacaaaaacctagcaaaccagtttaagaaaaaaaaaagtttcctttgctcatgtaacgaaaaagtgaagaggtattacttacttcagatacagttagttttgggatctcaagtgatgtcacctagcccagtacctctctcaccctttctccactgtgttttcaaaggctcttaaaaaaaaaaaaaaaaaaagctcttagacattatctctcgatatgggacccattattagtcttagacttatatcattgtacctcaattccaatagaaaatgaaaacaccattctctccaacagaagacctaggattacttgtaattgactctgaagaaatcacctacacattcctgaatcaatcaacctagttcaggagtacagtgttctgattgggcaggttccatcagacacccactcctggaaccagagccaggtaagttcaacccaaaactgtcagagaggagcaggggtgggtaggccacaacgaacagagatacaacaagacaaacagtgaagaagaagatgaaatgggtagcaggcataataagattataaagtcttgtaggtcccaaactctgtgtgtatgtgtgtgcatgtgtgtgtgcgcgtgtgtgtgagtaaccctcaaaagtatacaagtattgtgcttcctgtaatgacagacacccttctgttgataataatgattcatgtagcccaagaatataagaaagtattctgtttgtaaaataaatatttagaatgggaataaatttgtataaacagaagcatgtttgattttctttaaaaagtgcgtgataaatatgatgatcccaggaggtttgttcgttatttaaatgtttaaacatgtgatatgtctctttcagaataataaatagtagggaatagcaatatagcacttttcggccgggctcagtggctcacgcctgtaatcccagcactttgggaggccaaggtgggcagatcacttcagatcaggagtttgagaccagcctgaccaacatggtgaaaccccatctctactaaaaatacaaaattagccaggcgtggtggtgcacacctgtaatcccagctactcaggaagctgaggcaggagaattgcttgaaccctggagacggaggttgaggtgagatcgtgccattgccctccagcctgggcgacaagagcgaaactccatctcagaggaaaaaaaaaaaaaaagcactttttaaaaatcataatggatttctaagattgtaatagttttggtatgctgattggctttatttttggctacatttattttagaatctctgcattatcaatgaactttcattcaatttcttttctttctttttttttttttgagacggagtctcgctctgtcacccaggctagagtgcagtggcgcgatctcggctcactgcaagctccgcctcccaggttcacgccattctcctgcctcaggctcccgagtagctgggactacaggcgcccgccaccacgcccggctaatttttttgtatttttagtagaaacggggtttcactgcgttagccaggatggtctcgatctcctgacctcgtgatccgcccgcctcggcctcccaaagtgctgagattacagtggtgagccatcgcacccggcccattcaatttctaaattaggcataaaaacaaaattatttcgtaacatttctacaatgacctcctttttctgttaagtttctaattctgaagacccaaattcaattttatatttcagtatctcacactgattattctgatagttacattaaatccctcgtttagaaactgatgcaagttactgttttcaaatgttcatgctttgaaagtacatgtttgtcatctgatttcaaatctgcatggttccatgctgattattttagataacttcaggctgtactccaatttttttctgagagatctctgaagtaagcttttcttactctgttacaattttaatgagatacattctatgtattagagtgtgaaatatctctttaggacaaaatttaatcatagtcagtgctccttatttaaaggctaaaggcatcatcaatttggcaaaaaataaacaacactatctggctgcctgagggtccagtgactgaccttgagttgaaatcccagctgcctgcatcatgtgaccatcaacattctgtttttatcccagtggtaataaataccttatactcaaaaagacaagagcaactcagaagagagatttggtacttttcaaagaaacgcagcagtaaaagttgcatgatgcttttcatttcaaagcaggcaaacagagctttattatggcagagcagtccaatttaattttcacttgtgtgatgaaactattccacacgtttgcattaatttatgagcctttgtctggttttaatgtatttaataatacatttatacactctttgttttaaaaataatgatatgttttgacaatgcactttttcaggaaaatctgaggtgtaacaaaaagtgataatggtaagatagttcccattttgagtattaaaaaatgagtgcatcaggtaggattgggtttggctgcgtgtatcagaaatccagaaatagaagtgtgttaagtaagagagatttgttgccttgccacatgagtgagctccagctggaagcagtacattgccggtagagcagggccatggtggtcaaggacccaggaaccttccatctttctgtgcaactttcggtcttcgatgtaacatcattgtctaaaatggctgctggacctccagcctctttccaggtgtcaggaaggactccagcagagtgaaagggtttgtccaatttaagaagcgccctttacacagctttcctccaaatcccactggatatttctgcttactttcccttgcagtggattatgtcaaaatagtctaattccttcttttataacaattggagttgaaagctttgtttcaatctctagtgacaatactttagattctgattcccattctctgagggcatacatccgtgttactaggttgttactaaatatgcatgaatcttaactcaagttttttaaaattccagtttggaacccttggagaaatcaatacatctgttcgtattttgcccaatagtctctatgagtgctttatctaaaaatcataaattcagatacatttttaatatcatgagactaaagaaaatatttcccgttgtcaacagatatcaagtttcagttataaaaaatgagtaggttctggatatctgttgcacaacagtgtgcctgtagttaacaataccgtattgtatacttaaacatttgttaagagagtagatcttatgttgtcttcttattataataaaataaaataaggtcgggcgcggtggctcacgcctgtaatcccaggactttgggagtctgaggcgggtggatcatttgaggccaggagttcgagaccaacctggccaacatggtgaaaccccgtctctactaaaaatacaaaaaattagtcgggcatggtggtgcgcacctgtaatcccagctactagggaggctgaggcaggacaaccacttgaaccagggaggcggcagttgcagtgagccgagattgcaccactgcactccagcctgagtgacagagtgagaccctgtctcaaaaaaataaataaaacaaaataaaataaaatttccgtttgtatactgtctttaagacccaaatcaattctctctgactctagtgggcactgatatgttctactgaagtccccatcaccaggtagcacacccatcccctagctgctgggagtgcttgttgcccacagctgcttccttctccagagacttgttcttaccctgaagaaagccaggagcctgaaaggccatatgtgccccacctcaggtcagtttgcaaccaacgactgaaagtacaagagtccaacccatttgccacaaggtgagatcagctctgggatgcaatttgccctccagagctccctgtgggatcatgtggaaattggtctctaggtgagatcgcattcttgttttgttttccccaagccctaaactgtccccttcacacagtttctcttttgagcactttctctttttattttattttttgagacacagttttgctcttgtagcccaggccgcagtgcaatggcatgatctcggctcactgcaacctccgcctgctggattcaagcaattgtcctgcctcagcctcccgagtagctgggattacaagtggagcgccaccatgaccggctaatttttgtatttttagtagagatggggtttcaccatgttggcaaggctggtcttgaactcctgacgtcaaatgatccacccgccttggcttcccaaagtgctgggattacaggcgtgagccactgcgcctggcctattctaattttcatcccttcactcacaaatgctatgttccatcaacagcttgagtgtgcacatgagcgcacacacacacacacacacacacacttctgtgcttgctttttcgtggctgcaaacctgctctcttgtgaatccctgaatccacgtatgaagccgaagcttttatttcattttattttttagttgacaatataattatacgtatacctggttttttttttttttacattaactcttctccttatttcagctgagtttctatttatgcacaatatttattgttccgactcaggggaagtttcaagacacaaaccttttgacagcctaaattagttcaggtctaattcagaaacagaagtttccagattagaaaacctgaagctaaagaagtgcttgaagaggaacagggattcatgcaaaactagactaggtaacagagttactcatacacaagaatcttggcaagggttgaagtgggcatgtggaaggggctggcttgaaaatcaggagggtcagagaaagagctgttattgttaccctttgttcctcctcagatgtctatgcgaaaggctctctgagatgagagcacgatatagctcatgccggttcagccacttaatcttttttgatttgactgcacccaggtttctttaaatctgagctttagtttccttaactgtaaaataatggaaaaattcctggcccctcctcacctggttgctatgaagattaaatgagataatatatggaaaagtcttagcatataataaggtctggaacatgatatacatttaataaaataatacattttacttattattatcttatacctttcatatgaatgttaactgcaaaacagcatagccggtatttgctccttcacaatagaaggtaatatgcttccctgttttactaatcagaaaactggcctcgaagaggttaaattcctttcttagaactattaagaggctaagccacacttcaaactcaggtgtgtctgactctgtagtcaatgttcttttcacttcatggtgcttttttcctgtaaagtgagtataatatttcctaaatcataataaagctttgtgcattggatgacataaatataaagggcatagtgtataattggtactcaataaattattccttttcctccttccctaggcaagaactaattttctttctttgtttagcccctgtattaccagccaagtgccttgggcataatatacgtaaataggcctagtatgttgaattttaggcagccatcttgatttttgtaacaaatctagttctctttaaactattgcttagctcttccaacaataacaggccttgtagttatcccacatggggtgatttcaaagccacagagggaagattgttcttaagttactcctgcatgcagtgtcaagctctcacaactttcacaagaagttaaaaactacaattttatgtcagtctctcctccagtaatcagatagcttctttgattgttctgataacccaagagggaatccttctgatacagaaggtggctatatctcatatattttgcaactcctcccaaaacatagatcgatcatctcaaagaactacatgggaaacttgatagccttttggaggctgagaaagaaagctaagccaaccttgaaggaagtcaacaaattgtcaatggcattttgaaaaactgcattgcaatagacatctacactcatacgttatttagctcccttagggatatgattactcttggggtccacaagattcgatgcatgatcatttgagaatatttgtggctactattattttttaaacagatcaacaggcatgacagaatttcatgcatgaatttcatgataaggcattctcaattttatgttttcacttaagtgattatctctaatgttcatctatttccttcttatttcaatcctaccctagtttcaacccatccttttttatttttttcttgtttgaagtttaccctaatttcatgactgagcttctctaaattccttaattaagtcctccttgtccatcccagtacaaggtgtaatcactttcccctatatctggattgttcatctggttgttatgtattgcattaagttaatatatgcaaatataagccttgtaaatacagagaccaatgcagtccaattttgggtagatgccacattcaaaacaacaataacaaaaattaattaagtagtcacacacttaaataactcaaaagtgttaaaacagatatgaagaaatccacagcaacatttattataaaattactctttctcttccttggttttgcggcttctcgagttcataggagactttcagtttccagtgacctggaaactcaccattcctcatcaccatcctttactgtagtaacttccttttacctgaccaccctgcatagtcacagaagatgcactcctgacaagtgatcctcaaaacaggtagtaatctctttgagaagtgtgaaatgtcttttgttctccttgtcgttcccatgattgtcagctgtgaggacccttgtcattctaccctcaatcccaattctgcagggtctggggattctggggattcttttttttttttttttttttgtagttaccaatcttatatagatacaataatttttatgtgtattgatgtttattgacaaccagattttaaggtccttagaaattggagttaattattatttatcatccaagctcctttccctctgccctcttattttccaacacagtgtcttgaattttatcactttatcgtttagttattaagggtgatttggtgaaatgtagaacagactatatgaattacctcagcttatggtattatatgacataataacagaaacataaatagactatcataaatcttaactttttctttattctttgtaatattttattagtcttatccatcttgcttggattgccaagttcttctgagaattccagtaataatgttatcattctatcgagcttattattcccaactgatcttctattaagccagtatgaattagctactgtttatgagattagattatgcactttaatctctagaagaagcaaaagtaatgaatacactgaatctgccactgagaagacactttaaactgaaatgtttcattatttttctaattcctctctcttttgaatctgagtatgtttttggggtacgatacagtgtaaaggtttttgtacatcaagtcatagacttggaaataaaacacaaacaactacccttttgatgaaaatacataaacatcatagccatttagccaacttttaaatttaaaacaataaattcatgattttagttggagggtaaacatgcatctttttaaaaatcaaatgtaaacacagaatctatactcatgatgtacacacatggacataaaatattgcatatattttgggagattcaaagaccactggactccaagttaaggatatttttctctaaataaacttagtgattgaattatagaaaaccacaaactaagttattgactgaagtataggaaaagtatagtgtattaaaataaagttttggactaattaacatgattttactaatagtgacaagaggatttaccaagttctgattttttctaatgtaaaaaaaatttgttaagtaagatctttcaattagtaatttctgaaaccccctctaagtaaattaaatttttatatccttgaagaaggatgttgatcagtctcaccttatggcaagtatctcaatatatgtgatctgtcacctagtcttttctctattttattatttctgtgtttgttgagaaaaaaattatttgtatacaagtgcatgtactatttaatgtcatgtaattaaatccctttgatagaaacagttaatgttagactaataatgtttttagctactggtgaaatacttcctcctaatgcgttaaatgcaggataagatcttacttgatactaccacgggagtgtaatctctcccaatagtgtttgtttcatcgaagttggctcatttaggtagtttgagtggccagagttgtataagtatgtttggcagtggtggatggggaatggacagcaccaaaccattctttctctctgtttcgatttttctcctttgtctattgctagttgcttattcctgagatatccttcacctctctcaagaggcttggtcacttaacttcattccaactctacacctccattggtggaaatggaaagatggatgaaattttagcccctgtttatggccagcatccgactagtccttctttcaaaaatgagtaaataaaaacttattatggtatctttgaaaagttgcctgtctatgctctaggctttaactcaataaattattttaatggaaactgtgaattcaaaggaaataaaagtatggcggggaattatgcagaaaatactgtaatatatgttgataaaattttcccaagttaccacacctccagtacctagaacatagccagccatataatagacactcaataaaggtttgttgaatacatttgtttaatattcctttttactcttttcctcccctcttctttcccatgcatttctagttactcacatttataataatatattcagtacattttttgtttgcgtcaagatgcatcatgagggaatcacctgaaatttcaagtcaggatgacctggttagaacatcagttccaaaactgaatatttagagatccttttcctatctataaaattggatcacaaaatatctctcaaagggtacaaagcacagcaccaaccatatattaataataaggcactgttacataaatgtcagttcattttctcatcaccttcttaaccattttgctctctcttctgtttcaagacagtaaaatccaaatctctgtcagtaaaagtatatctgaccactctaatttaataaaatgcagcaataaattgcatgactcatttctcaattattttgcatgacttactaaaagtataagacagggtacctgagggatctgtgagggaaaggaagcaaaaatcatatacatagaagtggttggtttcaagtgattaagaataacctacgagtaggtgaaaaaaagaatcaggacaatacaatagactgcaaccaaaggtggaaaaaactgtaaaagaaatagctttagaggtctcaaatctgctttcagaatgctaggatctagttttcgtaaattagagttctcagtaaatgtaggacaagtcccagctgtactactgtagcattaacattaaaactaagccatatcttgaatctccttttctcttaaacccccagaggtttcaaaccagagaggtggtcaaaatagattcccctactacttcccctttctcaataagaagctctcatctgttgaatttccattttgaggcatttagacagctgagagagagagagagagtttaaaggagtgttcaatccatctggtctgttttttccccaaattgcggaagttatcatttcagtaacattatatgttgttaagcttatacaataagatctgattttaaaacttaccacataaccacagcaacaaatattgtgttatattgtcagaaggattgacacatagatcaattgaacagaataaagagtctagaaacatacccacacaaatatgcccaacatatttttgacaaagtttcaaaataaattcagtggaggaagagtagtgttttcaacaaatggtgctggatcaatgggacatccacggacaaacaaaatgtacatagacctagacctcatacctactacagaaattcacagattagagtgagattatttttctctttcttacagaaatcacatccatattgtctacttctgtgaagttcagtatggtagccacttgccatctatggccattggaatgtagctagcatgaattgagaggtactataaatgtaaaatacacactggactttgaagacttagtgtaaaaataatatgaaagatctcaataataattttatatgcgttgcatcttgaaatgatagtatttgggatctgtttggttaagtaaaatacagtatggatgttagttttacccatttctcattatttgtaatgtgggtatcagacaaattaaaattacctatgtggcttggatcatagttctattgctcatagctagcataatctataatttccagtttcagtttctttatatctgaatgagaaataaaagatatttgtgaagcaatctgcacatagaactaaagatttttattatttttaataaaattttacatttgtctgtccaagcatttgaatcattttgcaaccatatttattgattatttctacaacattcagtttagattttgcataaataaaaacttttgtaagtgtatgacttaataaatattaagcaggatctagtctagttacttgggaacggcaaagccctcgtcttcatggagcttacatttttcagttgataatctttatgtaactctagaaataattataactggcttaactaagttagcttttgggtacatactcaacttgtgagagcggaacctcatgggtctaccaatgagttgagtattacctaaaagtatccatcttgccctgggcattagccaatgtacttttcagaggaaatgcagggtgtttgttaatctggcaaattacctgagtaggcattggttacatggaagtctattcagagattttcctctgtactacgttgtattgactgattgcttttctgactttctccctagattctgaattcatcaagagttctaggaggggggctagcgattaaaaaaaaggacacattaggtacaatataccctactcaggtgacaggtgcactaaaatctcagaattcaccactatagaactcatttgtgtaacaaaaaaccacttccacccctaaagctattaaaattaaaaaggaaatacaaataaaaataattttaaaagtttttgctgcgtgttagcacctatgtcagtaattggtaaataataagtgtaaataaaccaactgatggatgaaatattttgagagaacattaattcaaaatttaaaccagtcaatgtcacattcaagccagattgcccaacctagtatatcatgaccattgacttcaatctttaatatggattgtctaagtcattggctggaagggagcatctgtctttgttttgtcctttgaagcaaacacttgaaatcagtttagactctcatctagacatttttgttgtttagaaatatatttaatggaatctttaggctagattcagaagagaagtaagctgtcattacccaaggattgttaaccttatcaataaattcgtagccctagggcataaagatcatttgtattgtttcagaggccttcgtgtctagtaaattttctagctattgatttttgcaaatgtacaaaattaacaattgtgagagagcttttaacaagcttgatttcagttgaaataatatgaacagtaattgttttttttctgttcattgggtaataaaagcatgtatgtaattgggaggccccaatactgttgaaggtaaatctgatgagaaacaaatattcaaagactttgtgcatgcaagagaatcaatagaggcaaaaaaaaaaacctatcttctagagagttgacaggaatctatcttatttggaaattcaaaaggtattcatgcatttctgtgttctgtgccagttacattatttatataataaatgcttttccatattgctttttatttgaaattctcaatcctataactaattattttacttagggaatataactgtatcctttacgccttctctttgattttgtcaccatgatcatcaaaagtttctccccatcaataatccaggtagactcccagccacactcaaggcatcatcaatgatctcagagtactacattggattaattactaatttttcctcattgacttctgttttccacaattcaatatttttctaattttcatttatctgcttgcttcttcctaaagaaggctcatgtaagtttgtatatgtgacaccaatatctctttaatatgtttaatttccttgacgtttctaaatagggttaatttaaatttaccttaagacccaaattatctgaatgcaagtttccaaaaaaaaaagctatatatcaggaattttctaggattcaatttcaaaaacaactttcagagtatggctaataattcaaaggtcaacaaaacacctgagcccactacaatcccagtaccatacaggtcaaaatcaagatttggcaggattgtaggatcccaacgttctttctgatgttaaaaaatatatagtaaataaagttattttttgttcaacagtattttggaagtagtaattgccacattgtatatatgtttgccattagccataaacgtgattttaccaatttattttcactacattgtgcagaattccggaaacttagataaaatattttaacacctaaatatatacacacacaaacacacacacacatgcacacacgctactcttccatgcccccaatctttctctttatctcagagttcaagtgtagccatgatttgacattacaaaatagaaagagtactgttggtttacctgtcaaattacttttatcaagccattaatggtgcttactgtgtgccagacattttttctaagcactttataaatattaactcatttaatctttataaagcctttaaatgatatatgataatattctctctttacacaaaaggaatttaagacactgaatggttaatgagcatgctgaaggccacaccattcataagtggtaaatgggaagtgactctgggccattttgttcccaagtccaagcttttaaatattttcctctgctcttactagacatgatattgctgagaaaagttttggtcccctgtgcttgaatataagtataataattaagtcatcttcttttccatgctcaaattttactctcaaaatcatttttctgtgccacacacattttaacagtttttcattatatacttgttcttctgagtagaaattgactctaaaatacagacaaaaagaaattatatttaagataaagtaaaaaaaaattctgggtgaaggatacattagaatatgtgattcaatttttacaactttcatataagtctaatttctttcaaattataaagttaaaaatctttcaaataattactagtcgaattgaagaatatgaattgaagcagtaccatttagtgcataaattcaaggacacaattttcaagttatattttctatgaacagtcctccctgaagttgtgcaaggagaaagacctaaatcgaagttagtttacctacattaaaatgcataaaataataatagaaaaataaactgaagcaaggacaataatatggattactctccagctttcataactgtgtttttaaatgttcttcagcagaaattattcaagcgttgtttcctactacagaaagaattctcaggacttctcagaaatacgtcagtttttaataataccaatacctgataggagagcagggacaatttcagtgtcattcatagatgttgtcccagaaccaagacagcatctgctccatagtaggtacttaatttgtggaatggataagcaaatcagtgatacatatcgatggtgctttttctactttaaaccacttttaaatgtgttaatatcccattaatagccttctagatttatttgagtagaaattaattcttttatttgatagactagtaaaaggcagcctagacagtttaaattgctcattcaggttcactcaatgaatacacactgaggaaaaaaaatatatatatatatatgtatgtatgtatattcagaaataaagcccagccatgactttttgttcaaggttctttgtactatattccattctttgaactgaaaagaggagaaattatagaagaagcaatgttttaaaaaatagacataaatgcataaatcaggtaacacacttttttggatacataccccacaatacctgaaaaagtagtaagcaaagtcactgatatttaatagaggaatgatctgaaaactttacaaatcaaaataactttgcgctttcaatttttagaaattaagtatttctccttactgaattcatccgtatgtagaaaattatgctgtattatttcaccataagttttaatttaggagtatgggttattatttggaaagggaaatgtttctcaaatttacttccatgttttaaagaataatcctgttaatctctttctcacatcttctcatatatcttatttcacttttaatttcctgtaagcttatcattcctgttaaattactccttgccttttctcagcgatgattgataatgatattgttgagctgtgtctctttctaacacctagactactattcaaactatatcaatcactccattatatttttaaaacctagaatatactactgagatctctcttgacctggtattcctgtatcctgccatctccgatttcccacactgagcacctttccttccttcagcatcctttccaatcagttcagaaagctgcccttaatctgctattctgttgccaaaacaacatcattaatcactttcagttaccttctttgcttcctatacatcaaaacttgagcgcttcctttaccctcagttactgctccactagagctttcttgttttaacgccccatcttcttgtcctgtgtgttttggttttcttcctcttcttacttgatgcccttgttttctttttgtgctattattaccttcattttattttctgtgcatgagcattgcaaattacaaaatcatctctttccccctttgtttactacttatttggttccggtacttcttttattctgtttgtataaatatgtactgaaagcaactgcggaaaaaacacctagatgaattgtgatcctatgtcgtcccttagctgagaaacatttcattcctgagctgtattatttgtcttttctctgaatacatttttttttcatactggctattctcctgtatattctaaacacacctttgtgtaatttaggtgaaattgttggaattataaattgtttagttagtagttgtgaatcatgcttactacagacatgtattatcaaaaatttcacaagaaggatagcgtgatactcaggcactccccacatttcctcaagccaccaaagagttttttgatggatgttcttgtttattggatgctctaaaactagacagacagtaaagattatcttttcctgctgctgaagtttaagtcatttttcccctaacttttattcacacttccaattatgaacttctaacacataaagaaaattgagatttttgtcatgcaatgctgaaacccaaactgacatgtaggaggaaggagcagcagttctgtgggtttgtcaggatgctaaggacatgttgtttttcaaattcgttattagagtcagtgagtttattaggctgaggtagaaaactgtatgctattagtcaaatttaaactaaattcctaaactcaagtcccttatagctcaaaatctgtagattcaagtaaacacttctagaaatgtcctaatatcacattgaaggagatgttcaatatgattttaatttagctgtctaagtctgtatgcaaaaaaaaaaaaaaagaaagaaagtaagtaaagcaaagcaaataataacctcaagtgccaactctaattaattggtagtatcttcttgaactaaaatgtggagaagtcccatctggcctctgtaggagagtgcaatgatctattagccatgctaatagatcagcccaggagaaggaagagaacaggattgttgattgcctgtggaccctgttgtgctagaacatttttcgtatgaaagtctgcatttcaggtgtggtaaattgtttatcagaccacttattttctgatgtgttctactttatttctgatacttgattaaaggtatgctgtgaaagtagtgtagtaataatgactcctaaaatgagtttatgcctctgaaatatagacacacgattcttcttcaataactctgcttatctgcttttagaaagtaagcccggaagtttacggactattgcaatattagattttaccatgtgtgtttattattgataatctaaaggtgaatttattaagctctacattggctaaggagccaaggctaaggattacaattaaacagctcaattatatttagcaagcaaataaaaccttaaattataaagcttccaatgatagcttaaagctcagaaatggccagttttttaaactaagcaataaatatatttttaaaatatttatttctagtgttacacagatgaatttggcacaagcttttcacttccttttgtgaaaaacttgttttgtgcatattccgtccactattttgtgtgtaatactctgtcatatcaaattcgattaattaaacaacctttatgggcatgaaccagccttggtctataacaatttgcaacttcaaagagacaaagtgattttcaaattactgcctaaaaatctatttaatatatataaataagcagaaaaaatatctatagtctttactggagaaccatgcagtagggtggggggagcatatggattttattttggcaagtgaagaaaaaagttattaagacatacaatacaataaaaaagaattcacaacatttagcaacagattggctgtgggtagcagaggctcatgaggagtcgacaacaactttctaagatattggcttagaaaacatgagtgggttgacttacatgttgttttctggagttgagaatgtttttactttgaagaacttttaacctcctctacaagactttttagctacgaggtccccttatcactatgagtaagagaggaatgcaattctgagcagatttctcctaaaactttatatagatagatagatagatagatagatagatagatagatagagatagatatagatatatatagatatagatatatacacatatacatatatatatatatatatatatacacacatatatatttttgagatggagtctcactctgttgcccaggctggagtgccgtggcacgatcttggctcactgcaacctccgcctcctgggttctagcgattctcctgcttcagcctcccaggtacctgggactacagtcgtgtgccaccatgcctggctaattttgtatttttagtagtgaaggagtttcaccatgttggccaggctggtctcgaactcctgatctcgggtgatccacctgcctcggcctcgcaaagtgctgggattacagacttgagccatcgtgcccggcctgtatttttaaaagttgtctttactgaagaggtctgttctaaacacgtattctgtgaggatttgattccatcattttcacacctgttactggcctgacatatcacaatgttttatgagaaaatagaaatgttatgaattcatttttaaattgtatatattgtacaaatttgtattaagcgaagccatggcaggatagcagtctattatttgccttctgtgcactgcagagttccagcagaggtggactttcctccagtttattagagaattttaaaatgtcaaacttcagtcaatagtttatgctgtttctagacctaatataacaaataataacctaatattgcaggtcattttcagaagcagtaaaatgctattatcctactaaaaatttttggagcacaatcacatgatatgaatttcttacacaagcatataagcaataaaaattttacagaatcttaagtgaggaaaaatttgaaaatgctaaaaaaaaaaacagcataaaaacagagatcagaaagtggctttgataattcaacatagaacagcctttagcttttgggctatggctctcaaaatatccaaaaccagttatttttggtgtgtgcgtgtgttttctgattctatttgctcccactcttccaacagcagtcccctgactcttccaatccctcagactcaaaatctttgagtcagtttcaagtattcgtccctttttgtcaattcccattaaatctgcttttgacacatctattcacttttatctttttctaagtgctatcatcctagtgtagggcttcatctccattttcttactaattattttttcaactttcaaagaatcctagaagtgtacacttattaaaatgcatttcatgctttggccctactttaaagcctatactgcattgatttgaatatacacttcggcagtcaacgtccctaaccatctgatcataagctaattattaaattggtatttgatattttaatggcacttgaaaatttcaaagtttccacagttattttattggattttctacaaaaccatctgtgccaggtagtttttattacctatctcttatccaagaggaatataagattctttgaaatttgacaacttacagactacaaatctagcaggtgttagctgtggaacttgaactcatatcctcagattctaaaacagtgtcttagtcacactacccccagtggcttccctctctatccaactctcactgtccagatcatgttccataaccagagttacagaacaattataattaccttccccatccaaaggcttactgtgccacagctcatttctagctgaaattatttcattttgagagatgaacttggacaattaattttggaaatatgaatgcaaaataacttagtaatttaacaacttcagattagtgtagggatagtttcaggagtaaattaaatgttgttgactaaggaagagaaagagaaataatgtgataaaaattattgaaaaggggtatacggtaagccttgtgagataaattctctctactcttgggcttattcgtggtagacatagagctcagaataggttttgtgagatgggaaggaggaattgtatgagctgttattgagagattaaaggttattctgggaagaatacatgtttcagaaacagcaaaaggtgggctcgattcctggttgtcactcattagtcacgtaaatttggttgtgttgtttaacctttctcaacctcagatttatcaataataaaatgggaataacaatatcaccctttctggttcctaaaatactgaacataatatatataaagagttttgtaagaaataggcactcatacataaaaaatggttttattctctaccagcatttgaccttgggcacattatttaacctctctgttcctcaatctacctcttctgtaaacatggggaaaataacagcacctacaccttgttggactgttgatgattcaaagagcagccgccatttgtgatacccttagaacagtgctcaataaatgatataaatgatgtgactaattgataaagacaaaagtcttgtgtttcccttagaaagatgatctaactatactgagactcaatttcctcatctgtaggattgggacagtaatttttcctttaatgttttgctttagtatttaatgagatacgtgacgtatttcatatgcaacaaaatgctattacaatgcaaagagttctggaatatcgaatatgttacaaaatttggggagaaattattagagtaatagagaatttttaacacctaggttggacatttaattcattgatagagttctaatttaaataagattaaaggtttaaaaatccttagttttgtctttaaattttgttatactatcttaaagtttgctaaaaaattgctgtgtctataagtttactagatcatcaccggcaggcaagaccaagattatcatctggatgagttctgtttgttagagatagtaaacacgtgatatctactcaacaccctttgagagaaactcacatttcctcttgataaatgaggtcagatattggtatcatatttaatgtcttcttcaaaagatcgcaatctaagatcactgaaggactttagaatccttgctggcttttgaataatagatttctaaacttaactttgccctgccaaatttatgtatttgttttaatggaatgtatttaagggttccatgtaccattgtgctatttttgcatgcccaggcatgctcggctgagaaggcaggtgaggactgaaatccagccctttgtaaaggcatccaagacacactcatgggattgtgtctgccctgaggaagtagagccttccttcacataaaggcagtgtccctgactaggctgtggccctggtagctgagtccaccctagaggacactttgcctctatttttcctaaacgcgttgctgatatccctcgacttacagtggggttatgttccaataaacccaccataatttgaaaatattataagtggaaaatgcatttaatatacctaatctaccaaacatcatagcttagactagcctaccttaatcatgctcagaacactgagattagcctatatttgggcaaaattatctaactcaaattctattttataataaagtgttgagtatcttttattcagtactgtacttaaagtgaaaaccagaatggttgtatggatacttgaagtgtggtttctactgaatgtgcactatttcataccattgcaaagtcaaaaaattgtaagtggaaccattgtaaatcggggattgtcattatatactttagaggtaggcctgaatgtgatatagataaaaaattgattgtatttttaaattgtatttaaaaattgaggtatgcaattcctcaaggatctagaaccagaaataccatttgacccagcaatcccattactgggtgtatactcaaaggattataaatcattctactataaagacacatgtacacgtatgtttattgcagcactattcccaagagcaaagacttagaaccaacccaaatgcccatcagtgatagactggataaagaaaatgtggcacatatacaccatggaatactacacagacattaaaaaagatgtgttcgtgtcctttgcaggaaaatggatgaagctggaaaccatcattctcatcagactaacacaggaacaggaaaacaaacaccgcatgttctcactcataagtgggagttgaacaatgagaacacatggacacagggaggagaacatcacacactggggcctgttggtgggtgaggggctatgggagggatagcattaggagaaatacctaatgtagatgatgagttgatgggtgcagcaagccaccatggcatgtgtatacctatgtaacaaacctgcatgttctgcacatgtatcccagaatttaaagtataataaaaaaaaaattgaggtctgcaacaggcaaagccactaaagaaactcagatatttttcattgtaatgttgaaaaagttatgaaatttcactaagcccgtgtctatgaagtgggaaaataacagtgatatgaatattatatgagaacatatttgtaaaatatttgttgtatgatagatacctagttttgaatgttagctatcatttttggctcttataataggttattggaaggtaggtgtgactcctatcttttaagcatgcagaatactgaagtgataaatttcatcattaattttcagacctttgacacttacttcggtgtttaaaaatattgatgtatgcagacagtttatctcctaaatatgagggaatgttatcatgatcactcaaaggatataccataactcatctgacatttaaaatgtcagtttgattgataaatgagagtcctgggtagatgaatgtgatttaaatggggtttggtttgcatacagaccaaataaataatgattcagttctgaagactggctagactagggctagggcaattaattggggtgctgggacatgatatctgagcaacagatgctaggttatgctgctttggtcaccaacaggcctgctccataacaggcaataggtacatagacctgacatttaagagcagttaatgtaggcctcaagaccttgaatggtaattaactaacatgaagaaatggaacagagtgtcaggattatctattatggcacaatttcctattctgagcatgcccagtggtgggtcagaggggaggtcaaggaacagatgggatcaggaagtaaagagagctctttccagctaggacaggcctgaggggaccgaatagacaatgcaaggcagagaatgagtcacaaggaacaaagaacctggcgaaaaccagagccacactaggtttctgatgaagctggccaccatgggcttctctcatttaagacactctctcaatccctcacgttcttcaggttggcatatgactgaacttaaaggctggagagctgcagcctacatgaggctagcaaataattaatgcattacagagcacttaaaatatgatacagaaatatacaattctgcatgtaaatccaagtattatgaaggaccaacacagaaatatataggcaataatattatgtgaggccataagataatgactttttattataataattatgcctgatctaaatgagctatgtttgatttctgtgtactttcatagctttatagccaagcatgacttctctgcccagaaaatcctgcctgatttactctttagcttctctctaatttactttctttttttgagatggagtttcactcttgtctcccaggctggagtgcaatggtgcgatctcagctcactgcaacctccacctcctgggtttaagcgattctcccgcctcagcctccagggtagctgggattacaggagtgtgccaccatgcctggctaatttttgtatttttagtagagatggggttttgccatgttaccctggctgtggtctccaaccctgacctcaggtgatccacccacctcagcctcccaaagtgctgggattacaggcgtgagccaccgctcctggccctactttacttttaccagctagggactgtttctcattcaatacatatatttgtttgtctgctaagttggatgtagtagttgagtagtggagttgaaaactgagagattgacagcagtcagttcattgaggattgtgttatcacgtgcactgggttagatagtgcaccctcaaaattcatgtcttttctggaacttcaaaaatgtggtttttgtttgcaaatggggtctttgcagatgtaattagttaagatgatgtcatattggagtggggtgggcctttaatctaacatggctgatgtccttataagaagaagagaagaaatacagagaagacacacagggagaatcccatatgacagaggctatcccgagtgacgtgtctataagccaaagaatggcaaggattgctggcaataccagaagctaagaaagaggcacggaacagactctctcctagagtattcagtgagagcatggccctgctaatactttgattttgaacttctagccaccagaactgggagacaatatgtttctcctaaaaaacaaacaaacaactacaaaccctacccagtttgtagtactttttaacagcagccgcaggaaactaatacatcatggaaatgaatttaaacatcttattatctataaagaatgtgaactgtcaaagcttactgttccattggacatcagtttcgtgtatcttttatcgtataatgcatgactagagtaataatttcaaaggacattaaaaaatacagacattttcttgaaggtacccaaacgtttgaattgtgggtcaggccaatatcagcaagggcatttgatagagtttctcacaataaccttctgtgcatgtaaataactgtatcttctcaatagatttgttattgtatatttggtcttgtagacttacccgaggaagtcagataatagcgtatttcgatatactgtgagaaaaataggtacacactaaataggagtatgaaaatacacaaagaattacccatcagcaagagcacattatatttgtttttcttgaaacacccattctttcctccttctactttgttttatttttaatctggctctcttgcttatcttcaaagttttatctcccccaataaatcttcctgccatggtgaaggttaaatgtaactcttccatcatccacgctagcacataccatatgcatagaagttataaagtccttgaagacagagactctattttacacatctttgaattcaaagccctaaaatatttgagccctgaagaagttgttaggacattttagccaccagtgcatactctagtagtgacggtagtgatgtaagtacattcctcagcttttctgaacattagtgaagaattccttttaataaagagcaagattttccattgatactcagatggacaagttttggagtattctcagagatgaaaaaggattatttttcatttgatgtacatgtattctgtgattttgtgaacacaatggatgcttgctcttttcattattattgttattcctttgggtaaggcctttatgttgtcaaaaacttctatttaaaaaaagtgaaaataataaaacattcagccatttgcagtcaattattcttgccactggttagtatatttatttaccagggttcttaattaatgttactgagaggctcaaagatctgaaaaacagcattggttccaagtggctgcatttctttcttattcatttatttattttttagaaatgaggtcttgctctgtcacttgggctgaagcgtggtggcgcgatctgctcactgaagcctcaaactcctgggctaaagtgatcctcctgtttcagcccatgcctggttaatttttttttttttctttgtagagatggcatctccctgtgttgcccaggctggtctcaaactctgggcctcaagtgatcttcccaccttggccttccaaaatgctaggagtacagatacgagccaccatgcccggctagctggctgcatttctttaaggcccagagcctcctgtggtagcatctggatttgaaatgctggctgggtgcagtggttcaaacctgcaatcccagcactttgggaggccaaagcaggtggatcacctgaggtcaggggttcaagaccagcctggccaacatggtgaaaccccatctctattaaaaatacaaaaattagctgggtgtggtggcgggcacctgtagttccagctactcaggaggccaaggcaggagaatcgcttgaatctgggaggcggaggttgcagtgagctgagattgagccactgcactccagcctgggtgacagagcaagactctgtctaaaaaaaaaaaaaaagagaaaggctcataaacattgtctatgtctaagctgcaacaatgattgatattgtgaagattattaatagtgtgggtcaactgaaggggaaggaaaacaccaaaggagaatttttccctcccaaatcataaaggcattcatttttcagagaagaagagaggaatattactttcattaaaagaataggaaaattaaaattgttgttattagccacaaatcagggtagagctgtgtgaatccatggggagaatgtaagattataagcagaaatcaaggttagttttgtcttgtacttctggaataagaaagatgatatgtaatcagaccatgtctctgataattttgttaaattagatgaagaaaatcacatggataagaaaatgtaattaaatcactaaaaataagaatgtcattgttttcactttcttttgctaagtaggaggtgaggaaaataaccttttactctgtacatgagtaattccaatatcctcttagaaatgacaattggattgtaaaatgggcttgcctttgaccatattctgaaaggataatataatgagttggcaaaagaccccatgaatagagtttatgtagaaagcaacaaaaaaacacaaatataaagaaatgcctacaaccaaaggtcagtataattgatagcaagatttcaaggggaaaaattagggtcagggaagatataaaatttctgtctccttgttttggtgatttttaatctagaaataaaacaggaatagtgaaatattccatagtatatctaaatatccatctttgtggcagggagctagaaagattcaggattattatttataaaccaatttagactaaattcaaagactgaggagatacacctaatttagaagaaacaggagctctgagacctgactttgcatattactactaatttttttcttagtgctcgttttgctgcccaggctggagtgcaatggtgcagtctctgctcactgcaacttccgcctcctgggctcaagcaattctcctgcctcagcctcctaagtagctgggattacaggcgcccaccaccacgcctggctaatttttgtatttttagtagagacagggtttcactgtgttgatcaggctggtctccatctcctgacctcaaatgatctgcctgcctcggcctcccaaagtgctgggattacaggcatgagccaccgtgcctggccagggcctttttaagtattattttttcttctaaagttactgatgctcaaatgaaacctaattttgaaaaatagaatgtttgaaagaaatagattgaatgaaaataacacagctgatatttttagcaagattcttggatatagctttagaaataaactagccagaaggagcagtatggcaagattaccttttctttatatcaattagacatattgtatcgtatgacttatttagtactgaagatgtctgtgcctttctgcagttgtttttcatctattaaaagagaaagatactatctatgctatcttttcaagatccctgtggatttgaattttcaagtgtatagataaaccttgattgatgaaaaattgatggacaaaattaattttataacaaaggtaaagaagtgagtattgccttcataatgtgccccacagcttttaacagaatttctttaaacaatatttaatgtatttttaaacaattatatatttcaatattaaatcttaagtatgtttcaggaatatcttctttaagataattgatatatcccagttttcatacgttttaaattttttacgtctacagtattatattttcttttgaaaaattgcgtaacattaaggtagtaaataaaaacaaaaatagtttaatgtctcttgtgggaaatacagttttgttttgttttgtttgtttgtttgttttgagaccgagtttcactcttgttgcccaggctggagtgcaatggcacgatctcggctctccgcaacctccacctcctgggttcaagtgattctcctgcctcagcctcccaagtagctgggattataggcaatgcactaccatgcccggctaactttgtatttttaatagaaacggggtttctccatgttggtcaggctggtcttaaactcccaaccttaggtgatccgcctgcctcggcctcccaaagttctgggattacaggcgtgagccaacgccccctgcctagttgtttttgaccacatattttttctctgaaatataaatgatttgtagcccaaaagtttaagtctgaatcaattgtctgtagtaaatgctgcaccatctacatttgttaatgagaacaatacagaactaacttgaaaactgctcaaattttcccttgcataatgctcagtttttaaaatgtattgccttctgtcttctcaatgggattgctgctttttaaattttcattaattcctaaaccatattccattgtattttttttgtacatttgctttaagtgactgtctattggaggaaaagaaagtgtaggttttctggtgaattataatagcaatatgattcctggaatgaagcagcttttctcgtttggaatgaccataaaatggcaatacacttaacagtaatacccttgtctgtgttacagcaatgggtcttaatggttttccatacgtgaacttagccgcttgcctacagagaattactaagtaactagtatattccacatgtaaaaatctccagagggcttccacacactttaatacacgctgatatacaatataaatgcaacgtatcctgaagaaaaaaaaaaatcacaaactccgtgtgtggctctcaacaagctactattttctcattagaaaaataggaaagctggccaggtacagtggctcacacttgtaatcccagcattttgggaggccaaggcaggcagattacctcaggtgaagggttcaagaccagcctggccaacaaggtgaaaccccttctctactaaaaatacaaaaaaaaattagccagtcttggtggtgggtccctgtaatcccagctacctgggaggctgaggcaggagaatcacttgaacctgggaggcagaggttgcagtgagccaagattgggccactgcactccatcctgggcgacagagggagactctatctaataataataataataataataataatagtaaagctaataactatacaatatcttacctaaatgtttaagaacacctactaataatacttaaaaataccaaaatataaaaacaaaacatacaaatgtaaagaacatacagtcagtagtacagcaaatctatttgattacttttttcaaaattctattttaatttttttgctaattttaaagcactgttattaaaagaaaatattttcaattggttttattctcattgtatcttctagaaatactagttcattttaggaaaataaaaatagtgagagaaaacttttagctctgaatatggaccatgtcccatgcctgccactttgttctagtttttgttatttaattatcacacactataaaggagttcttaccaattcttttttttcttcagaaataattgattcttcagttttttaaactgctttattgaggtatgattggcatatacaccaattctcttttataggcaatgaaattggagatcagaaaaaattgagtaacttacctaagactacaagtaagtggcagagctagaatttgaccccagacaggcttcacatacaagttcacagggccatcagctgcctgaaggcagagaccatgatttgtatccatagtatttatgtatctctcatatctaaataaaatctagtcactattcagatttaattgatattttcaattacctttgtatttttaaaagaagacacattatagaaatttgatactaaatgtaagtattcagttctttagttaaattgaagaaaagcagaaataatattctgtattaatacattagtgaaaagtcagcagctaaaatgtaagagatgtttggtgacacaagtaaaaatggattgtatactttttgccttatactacctgactctggcatttagatataacttgttccagagacctgtcataacttatatgtttcagacaagaaaagctttgggttacctgaaatagtgtagttaaaaatcaaacgctgtactcatctagagggactttgtttatccattcaaaaatacatgaacagggctttatcttggcctatttgaactccatgccagagggcagcataacatagcaaagcatgctgacctctccttatcactgcccttgttgaaaaccttgagttcttcttaatagtctggtatatagttttaaaatgttgatattttgttcacagctatatgtgatctcctaaacctttgcttcaaaatagtctatttctctgttgtggtttgcttcagggtaaaagccctctgatttcccacaatcaggacagtaatttggtaggttaataagttatgttgtgtgttagtgaaatataagtgctaaggaaaataaaagtagtagggcaagggaaatcaggaatactagggcctggaaaagagcatgaaataatgtgttatgatgagttgcactgagcaggttaaatcagaacgagacaagaagccaactagatagagaagattgttccaggttaagggaatgagtggaaaaaaggctctcaggtgagagtgtgttcaaggaatagcaattaagactgtgactactggccaggcgcagtggctcccacctgtaatcccagcatttttgggaggccgaggcgggcggatcacttgaggtcaggagttcgagaccaacctggccagtatggcgaaaccccaactctactaaacatacaaagattagccgggcgtggtggtgcacatctgtaatcccagctactcaggaggctgaggcaggagaatcccttgaaactgaaggcagaggttgcagtgagccgagatcacgccactgcactccagcctgggcaacagagtgagactccctctcaaaaaaaaaaaaaaaaaaaagactgacttttataaggaagaaagtagtaagagatcataaaatcaagaggatttggtggtacagattagagacttgtacgttttcgtttctgtgcagtagagaaagaacacagagacatttgcaaaacaatttaagaggggattccttcaatacttttctaatatccctctcccaaaggcctgtttattcttcagctaatttttactgataatttgtattttttagaaagaacgcatctctttattttatagtcatgtatcatcaaattatgtagtatataattatattagatcattacatgagcaggaatgggaacaatcacagttgattcttgctatgttccggttatctattgctgagtaacaatttattataaaacttaatagcttaaaacaccagtcactttttatagctcatgattttgtgggtcataaatttgagcgtgggtcaactgggtgattttccactctatgtggtatcaacttgatccctaaatgatactcagctggcagatgagctggtcagcagaatccaagacagctgtactcatatgtatgttgctttggtggagacgacagggagacttgggtcaactagatctattgactctagtacctacatgtggcctcttcagcatggtagacccaggattgttgaacttatcacatgggagctcagggttctagagtgaatgatacaaaagacggaaaatataagtttctggtatcttcaggcctaaccctggaaactagaacagcagctctttcactgcaggggtccccaacccctgggccacacaccggtacccatctgtggcctgtgaggaacccagctgcacagcaggaggcgagcggtgagccagtgaagcttcatctgtatttacagccacttcccattgctggcattactgcctgaaccctgcctcctgtcagatcagcaatggctttagagtctcaggagcacaaccctattgtgaactgcacatgtgagagatctaggtcgcatactctttatgaggagtatcaggcaatctagtgactgatgatgtgtcactgtctcccgtcatgcccagatgggaccgtctagttgcaggaaagaaagctcagggctcccactgattctatgatatggtgagttacataattattttattatataatacaatgtaataataataatagaaataaagtgcatgataaatgaaatagtctccaattatcttaacactatccctcacctcccccccactaaccccagtctgtgggaaaattgtcatccatcaaaccccagtctctggtgccaaaaaggctggggaccactattctactgcattctattagagcagccacagaacccacccaaattcaagggaggaaacaaagactttacctccccagtgaagaaatgtcaaaaaaattcgcagctatctttaatccgccaaagcatacgatttatctctcatagagagatttctagttaaggtttttcagcaggtcatcttgatccatagtaaatctaacaaagggaatggagagctttggttaatctaatgattcagttaaatggagatccattaaaatagattctactataattccattcattatttttcacattttttctaattttttattattcatagtgtttttgtccaatgacctttaaaatcatgaacatttaatatataggaatggcatccatctgaatatggcataattataaatgaatttactttaatatctagaaaacattcttgttcgttctctaacttttagataaaagccatcccttcttttatttaatttaactctactttaaggctttaaaaacctgactgatagggaaaaagtccaaaactgggacgctcgtgtagactatttactgcaataaatcattgtgaaaaatatgggcagtcaagtgctggatattctatttctgtttgaaccctaagaaatatcaaccgtcttctcactggcttttagcacatctgctccatttaaaactatggcagggaggtgtgtaagattgaattgattgtctcttggagtttactgtgcttctttcgaaactttgtttttcagtaaaggcaattgcttcttgagcagtactggttattccacacccactaattatcatgcagccatttagagttgaaatggtaatcaaaccaatgaaagcccaagattagcagcgttccttcttcatttctggtagagagattcatctgaatatctataaaggattttgtggtgcattctctggcagatgcagtaaaacaagtgcaacatgaactttaaaatacagctttgagttttaggttgaattttaagttgaacatatttcaaattttgcaatttaattataggagttaaatgatcttaaaggatcattctaggtctgaatagaattttaagagctagattttattaaagaaaagatatattttaagtgataaaatttatatattttgcccttcagaaattactggttgatgtttctattaaaattattaagatctaaatatacaatgatactcgagaccaattctcatttaaggaatggcatactgtatgacaggatgtgaggtgttaagagataattacatgcctagaaggtgtagtgaatcatatgaccaaaagccaagaacatccagagaccaaaattcacagtcatttcaaatatcattactccctggtgtgtgttattctacttagaaaattgcatgtttgttgtttgtaaatttagagacaaaaaatgcttaaattaattttttcatcatttctaaaaatttgctttaatatttactagcccagtaaaatgtattcaaatcataattataaatatcagggctattgagcaggggaatgtgtcaactgccattccggaccttcttctggaactaattttgattgccagcagaataaaatgcatgcaatgaatacaatgaatgtaatgctaaatcaaataatcaagtgtttatgtttatgtattttgatccccctatacatttaaaataactctgttttattagaagttctgtatttgagataaaatgcacctccctctcatttttcctggtttgtatgtgagaccacagtatttcacagtagatatccagggaaataacagacaaaagaaaggagagcaggaagaatattttaagatttattggccagcggcggtggttcacgcctgtaatcccagcactttgggaggctgaggcgggtggatcacaaggtcaggatgtcgagaccatcctggctgacacggtgaaaccccgtctctactaaaaaataaaaaaattagccaggtgtagtagcacacacctgtagtcccagctactcgggaggctgaggcaggagaatcgcttgaacctgggaggcggaggttgcagtgagcagagattgagccactgcactgcagcctgggtgacagagcaagactcgtctcaaaaagaaaaaaaaaagatttattaatttgtcttcaacaaaatactaactctgcagtgccctcaccttgattccttacttattgaggactaagcctatttttgtggattgaaatgatgttaattatctgcatccaaatacccctcataggggcgactgtgagcacgtccctctactagtaacacaatactcaggtgagagctggcaaacacaggaagactgaaaagcccgacttggaatcctgacttctacattttttaactgtgtagttctgggagtttcttaaactcgtgtgcctcagtttttccatttgcatctgtagaaagattgtaatagaaactaccttctctgttataatgattatatgagctaaagcatgaagaaatataaagcagctaaccctgagttagctctcaagaagtattttattattaacttgttaataccttcaacttataaaaatttaaaaattatgaaattttttaaattatgagatttacataaagttttcagaatagtctaatcaatacagacagaaagtagattagtagggcctggggacgtggagaaaggagagtgattcctaatgagtatggggtttcttttttgggctgacgaaaatgttttatattagaaagtggtaacagttggccaggcgcagtggctcacacctgtaatcccagcactttgggaggccaaggcaggtggatcacgaggttaggagatcaagaccatcctggccaatatggtgaaatcccgtctctactgaaaatatatatttaaaaaaaatgagctgggtgtggtagtgcgcacctgtagtcctagctgctcgggagactgaggcaggagaattgcttgaacccaggaggtggaggttgcagtgagccaagatcgcgccgctgcactccagcctggcgacagagcgagactctgtctcaaaaaaataaataaataaaggaaaaaagaaagtggtgacagttgcataactatgtgaatatactatatatcactgaattgtgcactttaaaagagtgaattttgtggtgtgtgagttatagctcaataaaatgattttaaaaaataaaatgagaaggatgagagaccggtatatttcagaatagtgcacttaaaaaatttgtttacagaacactaattgttcagcatactttctactggacattactgtatatatatatatatttagtattatataaatacattatatgataaccatatctgataaatattatcttactttatagatgatgaaactcagatcttcaatgatggaagtgacttatctattgttgagttgtaattggatcttatatatatttccctgctcccacagagcctacatttctgaaaaagaaattatgtctcttgtgataaataaacaagaaacatatcagataaaagtgttgcattgagaacaaactgagttgagatagtgagtgattgggtagttattccagcttcagtagtaaagagaatctttgctgaagaggcatgtcagctgagatatgactgtctagaggaaccagtcatgtaaaaactgaggaagaaccttccagaaggaaagaatagccagtgctaagacactgaatttcttatattttgtgtttagaaatgctagggttatagttagcaagatagcctggaaggagccttcccatgttttctcatatatgaaataactaacatggaggattattgtgaagttacaaaaatacatgaataacacctagtatagtatctcactcgtggttggtatataaaaaatattgctgttctattaattcctcaatatatagctattctatacaggtcttatgcaaaaaagaaccttagtgaacgtatttcaacttggtaagagttagttacacatgggctgacacaatcataagcatggaaaatagacaatagattgaaagcattaacaatggtagttggaacttcagaaaaacccactctttcttaatctatgatgaaggaaatggtgggttttccagtggtattgaaataaaaggaaactttttagatggtggagtaaggtatgcaaaggtagcgagcgtgtgcatctatggctggagagaaatccaaagacaagatagaatcacccttttgctctctgtgaaaactctgattttcctttcatggactaaggtctacactctccaatcatcttagttgcatacactattaattcatcaatcaagctacgtcatcctttgtgatatgttttgtttttctttcttctttttaattattgtgggtacgtaagagttgtacatatttatgaaatacatgtgatattttgatacaggcatacaatctgtaataatcaaatcaggataattggaatattcattacctcaaacatttatcatttatttgtgttgggaacattccaagtctactcctccagttaatttgaaataaacaattaattattgttaactataatcaccctattgtggtacagaacactagattttattcctactagctaactgtatttttatactcattaaacaagcccctcttcatcaccccctccccactacccttcccagcctctggtaacaatcattccactttctacctccatgagatcaattttttagctcccacatacgcgtgagaacatgcaatatttgtctttctaggttgtgttttgattagacaacctcttatttctaaaatttgcttaaattatttgagtacttgatccttcacattactgccaataaagcaaaccacagttgaaacttgatttttttctaatattttgaatgtatgctgtgtgcaaaggtaacaaagaggaatccatttaacagaaaacagattgctaatatcttcatcatttactttagattccagtctttggatatcagatttttctctggtcttcatatttatttgttttggcatcagattgcattttcttgcttggtttaaaaaaaactgtatttttttccctgtattatcggtgttgatttcctctgttcttattcttcaaattatgcagagaaatgtgtacaaagttaggaggagttaacgctatataaaataaactatctattaatatcattcggttaattttcaaagaggctgtaaatagatcatggatataggcaaataccagatgccacataaaaggaaaacctcaaagacattttttcttttattaaaaccatcaacagtaagaactgtgacagtaggttttgggtttttttattgccaaggttattatcagccctctaccctaaataagggaataaaatgatttctagtttttggacactgtgttatattattctgtaactacaggaacataatataatgctacagtcaaaagaataagcttagaaatcatctaagtttaaatttgtcactcattttctagaaggatgaccttatactatctatttaacctttctaagactcaattgccttataaataaaatgattataataaagacttcataagttgccatgagaaaagtattaagcacagtttctgagataaccaatattgataataatataataatcatcacaaaacattacctttctccttgtaaaaattataacgttaatggttttaaaaatgtaattctagtaccaaagtgaagtttgtattatgttctagttaatatatataaaaatttaaagaaaaactaaaatacatatagctgtgaaaatactcactaaaccaacatagaaaagcatttgttttgctctgtaaatctaaccttgatgattatgataataaaaataatcactgttaggttattttacttgtgattaacttctatttatgtaccctccctctattgatgtttaacaatagttcatagctatgactatttcatttcatatggctgttcctaaaatcatactgaacatctgactccatattcttaagacaacttgggacctctatctcttccctgcaacaatatttgtgagttgacaaacataaaagcctatgctttagcacgcacaagagatgtggaaaggtaccatttaaattagtaccataaattttcctttttatgtttcctaacctcatatttattgaaatgcattaaattaactcagacatctaaggatataacatttaatttacaataatctttatggttacttaattccattaaccttatctttgaaaggcgtcaaattaagaaatacagagcctgtcactttcatttattcgggggaggctgtgaactattcagatgatgtatctttgattgagggaaggaggtgcccaagaattagtcaattacgcaattaaaaaccccaaacctttcctttggtatgtttcacacaaaatctccattgctgtgctagattacactggatgatgaatcactacttgaatcacttcagttttgattattcaaagtaaaaattgaatggttggcattttcaccaatttaaaagcctcgccgggcacagcggctcacgcctgtaatcccagtactttgggaggccaaggcgggtggatcacctgaggtcaggagttccagaccagcctgatcaacatggtgaaaccctttctctactaaaaacgcaaaattagccgagcatggtggcacatgcctgtaatcccagctacttgggaggctgagacaggagaactgcttgaagctgggaggcggaggttgcagtgagcggagattgtgccattgcactccagcctgggcaacaagagtgaaactccatctcaaaaaataaaataaaataaaagccttaactttcattttctcaccagattttagcttgacaaaagctatctttaagggttgcttaggcatttcagtttgaaatgtttatgttcttgctataaaatgtgtggacatgtgtgtccaaatatatacacacaagaaattttaggtactgtcatagtgttgggatcattaagaattgtgttttcatggcgagtaaattaatttcctctgctgtgagtcactttttggtagtgtatgcatggtttaaatgaaactcactgaactgtttttgtggattcactgcttggttgttttactaccctagagagcaattaggtgtatgtggagtgtgttgaacctataaaattttacttgtgtgatgactgcaaagaaaatgaaagtagtgtcatgcaatccatgaaaactctgctgagtttctagctagtctcttaataaagtttacacaattcaaactctccaatcatactgaatatcactgaggctcttaagacttgtgaaaatcagatattttaaatttttaaattgtcatattatgtcgccaatttccatttctactctatatttatagtacttttttgcattttgagtgcacaagtcaacccgtttggccatacatagcaagacatgtattggtgagagcagcaaaaaatatgtaactgctcgtttacaacttttgaccagtagcgaggtcacactgagagtaccgctcaggagaattgagtcaagttttaggctactaaaatttgctgagctctgtgacctagggacatattcctgactccagcaggcctttgaagaaatcacgctggcaacctcacaatagatgaacaagaaaatggatgaacacaaccatattataagaagcagttatcagacgcatgggttctggagccaggctgtttgctgagttcgaatctcagtgctgctatttaatgactgtgaccttaggcaagttgcttaactctgcctctcttaattttggaaattaggaaaagaactacttacattttaggtttgttggaaagatttatatcacttaaaatgtatacagcatgtaacaattattgaattatacttaacaattattatctaggggaaaatatactgatgattttgtatattgtatatatatacacacacgtatatatcagtaactttaaatggggaagtcactaaaaaaatcataacttggtgtaaatatacttaatctgtatgccacggctagttttttgtttgtttatttttgccaagtttctttaatttctgttggccttttggggtcaccccattagcatctgcaggatagcttacttatacaggggaaagtgtctgttaccagtacagtacagtggtggtataaggaaaatctattaaatgaagtcctgggtgtttatccctataattgcataaatgtatgtttctcaggagtagtgttgtgtaagtaaatggataaaagtcatagagtgctaaagctaaatggaaacaaagttatttagtccaattcccatattttatagatgagaaaactgagaatcagaaaatggagggatttgttcaaggtcatagtagttattgtctgagatgaggaaaatatccaaatgtctgcttaaatactgagatatgcttaagttagcgttgaaaatattccatttaaaatagcaatattttcttcctcctgaacatctttgtactatttagaaaaacctagaaagcatgctggaaaactatccctttttcccttgtcaacctccaattaacacaaaagcccaaactgtacactgtcccttataaaaacaacctaaaattttgagaataacattcataatcttaaaagaaaattacctacttactacatatgctggcaatgtacttgctgggcaatcccacttgaaattcatagaaattaaacagcatttcagaacatcattccaacacctaattaatgacagggagtgactgctgactaaagaatgtgtccatgatactttcaatttatagcaaaaactcttaactattgatagcagaaatgtgatatataaggatcttgttctgtcctttcaaaagtcaaacagaaccactgtcccttaaagctgatcggcaaaggaagaagctgggagtccaaaggatttatttatacaaaatatgtatttccctaatgttcactttccaactttgattagacattttttttttttttttttttttttttttagcgatggggctgtattagtcaattctcacactgccataaagaaatacgcaagatgaggtaatttttaaagaaaagagtaattggctcaaagttccataggctgtacaggaagcataatgctggcatcttctcggcttctgggaaagcctcaggaagctcaaaatcatggtggaaatgaagggggagcaagcatgtcatgtggccagggcaggaacatgagagagagagtgggaggtgtcaaacacttttaagcaaccgtatctcatgagaatacactcaccatctgaagacagcaccaatgggatgatgataaaccactcgtgagaaatccacccgcatgctccgatcacctcccaccaggccccaccttcaacactgggaataacttaaccgggcgtgatggcaggtgcctgtaatctcagctacttgggagacagacgttgcagtgagctgagatcgttccactgcactccagcctgggtgacaagagtgaaattccgtctcaaaaacaaacaaacaaacattggggattacatttcaatatgagattatggcagggacaaatattcaaactatatcaggggtctcgctctgtctcccaggcttcagtggcaccatcgtaactcactgcagcctggaactcctgtattccggcgatcctcccacctcagcttccccagtagctaggactacagttgcgccaccacatctggctcatttttgtagaaatggggtctccttatgttgcctgctttggtctcaaactcctggccttaagtgatccgcccatctcggcctctcggagtgctgggattacagacgtgagtcactttgccctcccggactggttttatgtgtgaaggaggctgctgctgatttcatgagtaagctggagaaacacattaaggaatgatactgtccccttagttgtcaaccttcaaaataggaaacaaataatagcaaagaggtaaacgtggcagaaagcaggggtgagaaagggaacaatcagatatgcgaaacatcaaagaacaagaaatagcaacaaacccacgccagaagccagcaagaaaaggagaactgttataagtaccagtaaaaatgctgaagaatggcaataaaaaggagaaaaaagtactcacaagggaggccttgaaatgacaataatctattccaggatgaaaagaaaaggaaacactactccaaggcaaaaagaaaataaaaagtaaggaaaatcaagatagatgaatatcttcaaaaaatcagcacaatggagatagagtgtttagggaataagaaaaaaaataaaagtagacagatacagaaagaagtagcaaatgcaaggagcaatatccctattattaatgctggcaaattgtacttatatctctttccagctatatagcatgttcctgggaaatagcctaaagcactgagaattagggataggagaatgctgttactgtgagaatacgaattaagtaatgccagagaaaggctttgctgccaatataatagctgagtgatcaggccacgtcatttctgtctgatgtttcttcctgtcgaataggtaatagtattatttctctaactcaagggacattaaaaaaatattcagttaatgtatatataaatggagacaatatagacagatgtttaagaatattttggttaaaaggacagactcaaagccaaactttctgggttggaaatccaactctttcattttctctcagtactgtactgtaggactctctttttatacactttttttgtactgtcttttttatacactgactctcttttttccttagtttcttcatctgaaaaatagagttaataatagcacctacctcataggattgctgagatgagaaaattaacaaataaaaatcacttagaccagtacctatcacatagcaaggaaaatctcaactatattcattgtggtgatgttttgttaataaacttttaatatgaatgtaacatatcacattcattaatatataggaattatatttacttacattgataaaagtcctatctgacatcatcttctgttccttcattatttttcccttcttcctcactttttcagttctgtctctcttggttcattccaaaaaagggtcatttcttttttgcctcaactgcagaatgcatattatttatcaagcaattattgagcacttaccatatacaggcactgttagaaagacatctaaggcacaattttttagtgtgctgaaatagttattcattcagcaaaagaaggagctcataaaaataaaaaagaaatgctatgggtaaatataagaacatggtgatttcacttggtcctcttggatgtaaaaggaagctttaccaaaaatgttaaaataataattgatggttgcagtgctgctgaattacatcaaactttctattgtctcacatttcactttctaatttgtccgttcctagtgaaactagaagctgaaaccacatttttactcatttctcccgttatcctccccccaccactataaaaagagaacatttatgcttaagtgcttctgatgatgtgttctcagtatctcattctgttagactaatagtcctcatgccaagttaaagtggttggaaatcctagcacaccttgcctaagtgtgttttatttatcttgctacaccccgttttattgtaatagtcttgggagagccccgaaagatggcattgacctatttctataaactttaagggagcaggggacgatctccctccataacaaattccaataaatgatgaggttaaaaattatagaaaggatatttctagagaggtatttttatgtgataaattttaatatatatgtatatagtttttaaacttgaatatataaaatatatactaaacttgtatatttatatatgtattaaacttgtaccacttaaaaattcttctgtagaaatatcttttctataatttttaacctcatcatatataatgatggtaattcttcgtacttcttactcctaattgtcttagttcaattgggctgctataataaaaatatcatagactgtgtaatttataaacaacgaagatttattgctgcagaactgtttctgcagcccaggaaatccaagatcaaaatgttggcagatttggtgtctggtgagggttctgtctgcttcacagatggtgccttcttcctttaccctcacatactggaagggcaaacaagttcccttggcctcttttataagggcactaatcccattcatgagggctccgcttatatgacctaatcaccttcttaaaaccctacctcttaatactgtggcattggggattatgtttctacatatgaattttggagggacacaaatattcaacccatagcactaatgaaatacagcatttttagagagcaatgtctactattttacaggcagcttgctactcgtgatgacaatacttcttcgatctagtatcccagcattgttccattaacaatgtatgcatcttaccaatgtaatgttcagtaaatattttgcatattttaagaggaatctgttgtggttttttttttttttttttttttttttttgagacggggtctcactctgccacccaggctgaagtgcattggcttaatcacagctcactgcagccttgccctcccagaccacaggtgcgtgccaccacgcctggctgatttaaaaaagaaattatttgtagagacaaggtctcactacgttgctcaggctggtcttgaacttctgggctcaaccacccctctggccttggccttccaaagtgctgggattacaggcatgagccaccaaacccagcctgattttttataatacaaaataatatacactcactgccaaaagtagaatacagaaaaacacaataaaggtaatagttgcctataattttgctattcaggaataaccagtgttacctgtttggcacagacattcctattgagaactatataatgatagctaatatttactagcacttggtacatacccatgtttcaattaccttatatgttaaatattatccatttatgcctgaaaataattttataatataagtactgttattagaccattttaaaaatgtgaaaattggtgcaataacaagatgcattaacttgttcagggtcacaatgccattataaaatggagccggaattctaaaccaggcattcaggctccagagcctaggtttttaaccactaagaataatacattttagtattttagcatacacatagttttggaagctgcttaattcacttaatatatcatatggttttccaacgtagttaaatattccataagaatgtgatttttttatgtctgcatataaatatattaataggatgtaccagaattgttttcatttctatttcatgaatatttagtttgcttctaatttttcacaatagaaatgatctagcatattttataaaatttttgagcagatgtacaagtatttagagactagtatttgtttaaataacacgtgttggacgttagtggggtatatatcaatgtgaaacatgaagtagatgtttgctttgtggtaactatgttccaggaacagtgctaggaagcactagggactggaaagctgtaaaaaagccagtctttctgttcttaaatatcttataatctaatggagagagaaacctgtagaatagtgcgtttcagtagaagcaagcttagtgtactgagaaatgaaaggcagatgatgaagtttggacaatggatggaaactatcttatcaagagttggggttataagaatgacagtaggtgatatgaagaaactagtgttttaagaagatatatgtggcagcattatagacatatggggatttagaacaggattatacctactgaactggacttattttatttctagaaattttgtgataataaataccatacattatatgttgttctcatataggagacgtaatatatgggtatgccattaatcaaaggctgattttaagtggaagaattcgttctgttggtttacagtcccagttataaattaatgggcttaccacgtagttgttcccagatcttggaagtattgaagttttttaaaaattaattaatttatttttaactgacaaataatagttgtacatatttaccgagtacaacgtgatgtttttgatctatgtgtatgttgtagaaagagtcagtcgagctgactaacatatctatcacctcaccaacttatcattttttgtagcgagaacattaaaaaatctattcttttagcaattttgaaacctataatacattatttttaactgtggtcactgtgaggtgttgaatgttttaggaaattctcagataatctcagggccaagtgttaagcagatcattctctgagactggatcttctgcagtatgtctgcgaacttttttatttcactctaagcctttgttgttgccttcaggggttactgactcacgtttaactcaaggctgactgagttagatatataccgcctatagttgatgggttttgttgccagaaatattcttttgcttatcagtggggaaggtttttgcttctactgctggatttaaaggtgtccctcaagattccattactcagttcattgagaaaagcttaaagctaacggaggggagttctgagctctgtttgatgaaggaggctgggtaaaataatagctcccaagttggctcaagttcttccagatgttcatgtttatgtaaaacttaacacttagagatattccatgttgtaagatgtctgtgcaaaagttccttatatcaaattctaaaatgatttttggtcatcaggtgcaaaaattaacactaatcatctaaaataaccaaccagatagattttcattctgtttgacttttgaaagcaaatacccctatgatattgagtgagtgttttattgtttgattttccttcaaacttgctgtaaccctatgggaaagatatgcaatcaaaataaaagaacagtatccaaaaataaatgggtcatgaagaattgtgcttaaaatcgttaagtaaacagacacacaccacagtgatgagattgtagaaactggaaaaaatgctgccagctgaagagctgcaaagagtttggcttttcatgaacttagttactgaaatgaaagttcctccctaggagagaagccaaaatcatagcacggtttgaataaaagtacacctttccaaagttactgcagaacaattatggccgggatcctttactcttattgagaaagctcggtaacctcttattttaaattgacttccattgagcaataatgcctccctgcttgcactgtaaggtactttattgggtaatgtgtttacaagctggtctcatttttctttttgtaataggagatgggtagcttactgctatttggaggtgactccaggaaacatgattttcaagatggtcattttaaaaaattgtgattattgggaataataactctagagacaagatttaatggacttacttccaatttattcagtatgtcaccaggttattgcagttctagttttaaatctgtacattcgaagtctacgttgttccctgatgtactgtatatttaggtttgtactactacatataggtgctaggtttagctccaactctcagcaggagcctaacctctcagaacaattattgtagccagatctttggtggccctactacttgctttttttttaaccactactatttctttaaaatcaaagatatggcaaacatattactaaaaggaagaaaacccatcttcaacaacattatggtgtttttcacttcaaaggcttattttgtatgcatcatttgatttaatttcctccaaagccttgggaaatgtgagtgattatcatcttattattgttgttgataaatagtagctactatttatttagcactaactctgtatctggaactgtggtaaacaccttgtagtggaaactaacaatagcctcaggaggctggaattgatattatccccattttacagacaacgaaatgtgatataaataacataacgtgccaagattatgcagctagtacataggagaactggaattcaagccctagttaaattgctttgacttcggagcctgagtgttgattgtctatggcatgttgccaagctattttatagctggaaagcctggtgatgctaaaagtttaaataccttgccctaggtcataaaattagttcccaatgccttccaactgaaatcccaaacattttttattacactttgttgtccgcaggactgctacccgcttatatggtactctttgaaaattaaacaaagaggcatcctccccacttcccaaatccacagaatagccaattttgaaagaaagcacgcttttttttcagtatgactctgctttattggaggatcacagggatggctggggggaatgtgggtatgatactcaagcacctttgtgcaaggtgcaatgcccagagccataaggagtggccccagttgtgctcatttaaaggaatagttggacaattctagataatattaagggagatatccaaaagagtttcctataagtatgtgctcttaagagctgtaaggaagtaaaattttgaccccattagttacatttctaacatgatctaacatcttcccttcactgccaacgaaaatgtttaagaagatataatctgacagcagttatgctaaaactcccctgaagccaaaatgtgtcacttctcaaaatgaccctcatcttcacaagcccttgaagaggagttgaggattatttatgaactaggttttaacctaaggtgatacattgtgctgcagttgttactgagcttagggatcattttgtctattcatttcaggttaccattaggttctttttcaaaatcaattccttttaattatacagctaccctgggcatatattaaatgtcttacaacattgatacgctttcccctgaagtactgacaaagtaatagatttaatgcgcaaccacaggcataaaaacccacacacagtgtaagcatacaatgagtacactgatactcacaaaagaggtttaaaaaaatgtctgtaactggggatgtggtggtgtgagggccccatgaatttttagcttggaggatatcttatcgtaccgatgaaccctgaggatatgcatgaaaacaagctcctactcacaactttttttgcctgaatggtaagtttgtctgcagggcttggtctgattgatttgaaggagcatggtctagaaagtggttctcaaactgttggataacagaatcacctggggggtctacctaaatgtgcaaaggcctaagtcttatcactgctttaatgaatgtaggtctctgggtttataatgagctcgtcagttgattctgatgagcacctaatttgataacaacatgtcaatgggtacagattctcaaacttggctgttcattagaattgcttgagtctcatttctagagactctgatttcattgatatgaagtgcagtttgggcactgggtttttttcttaaagaagttcttcaggggattctaatatcagcaaagttggagaaccacgggtctaggggcctcgctacccgatgtgttgtccaaagaccaccagcagcagcagcagccgcagcagccccagggaacttattggaaatgcagaatctcaggtcccacctaaaattaccgaatcagaacccgtattttaccaagatacccaggtggtttgtatgcccattaactcttgacacacacttgtttagggagtcaggtagagctggattcttaagcacttccggttagttggatgactgaaaaacctctctgagctccaatctcctcacctgtaaaacgagtttaaggaataacattaccaatattgcaggtttgctgagaagattcttgaatgcaatacctgaaactcagtttaattcctagaacagtgaaaagcctcattaaatatgaagtcccggccaggcgctgtggctcacgcctgtaatcccagcactttgggaggccgaggcaggcggatcacctgaggtcgggagtccgagaccagcctgaccaacatggagaaaccccgtctctactaaaaatacaaaattagctgggcgtggtggcgcatggtagtcccagctgctccggaggctgaggcaggagaatcgcttgaacccgggaggcagaggttgcggtgagccgagatcacgccattgcactccaacctgggcaacaagagcaaaactccgtcatatatatatatatttatatatatatatagtccctactagaagagagtccctgtgaacctttttttacactagtggccccagagctaatgaggccaagccccaccaatgatcgtcgtcacagacattcctgtttttctgatatttataaaggttccttttaggtatgaggtgatttttattcaaaagaacaaatgttcccagatgccaagtgtcttccgctaaaaggataaatgatcagaaagcaatccttagctacagtgtccttgaaggtgcattgtggaatcttgcactgttgtgcaattgtgaacaacttcatcagacagtactgcgtatttgtactgtgttatccttaatttttccctttagatcttaatttgttatttatttcttccctggccaagagctaatttctttacagaaactcatatatagggttccttttttcctcctcaagtcagtaacttctgcaattaactacttttttcttaatttctctaactttggcccaactaaatattttcccatcattcctgttttgccgccctcgagctaggacatggaacttacttgttcggaaaagcttctatctgattgaaagggcatgctaattctttctttatagtgtaattgtttcacatttaagagggaaggagaaacgcctaaagtaataccacagaagaaataccctcaactaatctttctaagcagtacgacaatgagtaatgattacagttaattaagttaggcaacctccatttccattcacttagtagcactgctaattatactcatgctacaaggtttctttagttcttctgtaatttggatgcagtactctttgtagacaagggaatacggtacgattaatgagatttttcccaccaacacctcctgttctctccaaatgaaatttccgcatctgaaaattgagagtagggaacggagaaaaaaaaaatcagtcacattttaacttactgccagcacggtccatgcttataattgccaaatattttatattaaagaaaacaaggtgtgggtttttttttttgtttgaaaccttgtaaaattgtggcttacgtaaaaatgaaataagtatagaacatggctttttaaaaatatcagtggcaatgataatgacactttatattgtatgcttttggtcgcattaaataaacatatgttgagcacatactgtttgccgggcactggatctactaaaaaaaaaaaaaaaaaaaaaaaaaaaaaaagcaaaccttaactgtaactctggatttcttttacatgaacttcaatcattttaacaacttactctaaagaaaaccaagaactgcagctctacttggttatattgttaatgaagtccttggaaaaatttagtttatatgctttgatcagatggggattgacatacttaagagttttatttttaatctgaaaatccacttcaatcttatgctctgggtaaacagtcattacagaagcctgacacaattctgttttttcaagaagcaggattcaaggtttaacttcaaatacaaatttgagtaagttatacggattattccttttaattctttttttaaaacacagggtttatgtggatgaagtttcgttcttaatctccatttgccttaagaattaacttctgcattgtggtttagattgagtttaagattgtttcagattttaaaatgtatttttaaaggtgtgtctggaggaagatatttgtatgtcaagcactgttggttttcataggaagttcaaatgtgttttcagcagcactggacgtttttagagttattttcttctcctagcatcacacaggtgcgcaactttataggtccagtctcttctttttgcttccttctctgcttctttttctttttcactaacaccagtttgcataaatgagtgcactgtcgagttcacgtgaataccagacaaaaatacaggtgtcttcataataatcagctcctctaagtctactttccagtttctgcttcagactcagataaatcctatataaagcagacgacacagttatttctagaggaactgaggttactgattagaagggaacgtaatcaggtagattgagccggtgagggaagaaaccattgctgtgagaggggagtgtttgcaaaatgctgtctgtgaagctgaatctgtgagaacacctcactattcacggcaaccggagtggaagaaacaggtgcaaaaagattgtgtgtttgtctgcttttgtgaggctggtcagagattctgtgcctgctttatctgtgcttggctatgactctacctccaggtttaccataccccatagaatgtgtaagagaaaagtaccaacagggaaatcagcaaaaagctttcctatgaaggtgtgtagccagcctccgcagaatttgaaatgtctgaggtctcatctggtgagtaaaagctgcagataaatgcaacagccattcagaagaatgataaattccacaagcattcagaagcaggcttccctaaaggtgactcttttggtcaatttgcaacccctgggatatatttggatgactcctgttccatatgcctttctataaaagttaaattggggcttttgttgtgaggaagggaagaaaggggtttgacaccaataacctataggataatgcaaatcactgaaataagaaggaacccatattctactttttgggttgtggctttaatgaactttgtcttcaggtatctaaaattatttctagtatgaagaaaagaaaaaaatatccagaccttaatctataaacgataatatttttacctcaaattaaatttctaaggacgtagactacattcataaactcattagaaaactaatgagggatttttatattaacaatagaaaaacctgtgtttcacatatatatatgggcttatttatgcatatatgtacatatgaatatgtgtatgtgtatatatatacatacacatatacactcacatttttaagaagtttttaatcaaagaagacggaaataacaaggatccttgtgaatagtaatttagacatgtttagacaagcacaacttattaggaagcaaactgggacaattgtaaacagtaattccaggctgcctaattatctgaaatatctcagaatgattttagaggttaaacacttattattaaatggtagcttctaaataaagtgaaaaggtgtagtgatttatcaggtttttttttaattatagaatatcctaaaattctaaattagcatatattctgttgccaatatatactgtcagtatatttgaagtatattaatttctaaattatgttacttttattaaaattccaaagagtttctgacttggacaagttttctctatctttaggaagacagctagtttttttttcaggggggtgagctaaaagagttaggataaagtacaccgcattaaattaaaaacgtgtgttgggaataaagacaatccaaagttaaaagtctatttggatctcaaattttcccataacttgatttgtaagaaaagttacccttttgcaagtcttctctctcatttggtctggactaagtggttgtcatttctcacttacagattgctgttttactaatctctttataaatatattttttaattttatatctgtattttattcatcagattgtcctggaagtacagaggccagttgatggtttatgagttcaagctgagccgaatatagctaagccctgtcttgcctgacatttcatcaaaagctgtgttgatttgcaatgtttaccgacctatttattgaaccttcacagcttgaactatgccaccaagctcgctgacattgctgagattatctctaaatgcatgtacaaactaaggaggaaattgaaaaataagttaaaaacaatcatccgtctatttattaaattatgcttatagagtccttgatttatgtatttgtttgattgttctccgcaaagccccatgacctgatttttctttgatcttcccacacactcttggaagacgatagattagaacagtggttctcactcttccttgagtgggcatcagattcacctggagggctggttaaaccacagcttgctggatgccacccccagagtttctgattcagtccttctgaagtggggccccaacctctgcatttttaacagattttttaggagatgctgatgctgctagattactaagaacagaaaatgagtgttctaatacaaagagcagaaaataattgttcttaatctagttacctgtgttctctttatgcgttgtttagtttacactgtacaagaaaataaacacatatcctcacaaaattgaagcatatattctactaaagattaatatattaaaatattgaataaaatattaaatatctatgttaggaaattgtattcctgctgaaactggcagtaaaattacttaaattacttagcagtaaaattactgttgacaaaagtaaacaattggtcattaggtctcaaatacgtaaaacctcaattttttttttttttcttgagacggagtctcgctctgtcacccaggctagagtgcaatggcacgatctcgggtcactgcaacctccacctcccatgttcaagtgattctcctgcctcagcctcccaaaaccctcaatttttaattactcctttgattcttattctctgcgatttctccctatgtaaagttttagtctattatatttttagtaaaatgaaagcatgatccatgagataagcacttgaatctatactatacatcaaagtctccccttttgggccattaaaactaagatgttttccaacttaccttaccaaagccacagtttgaaaactgaaactatgaaaaaactggatattttgcttaattataatgcttcgtaaaaaattagaacgtctttaaaaatgttaacaactaaagtcaaacattcaaaaattataacctttgctataaagttatatgttcattcattgtagtcactttcttttagtaaaatgtaagcttttgatgtattctaatggggcgcaacgtttagattaaatgtttaatatggataattgacttttaatgaaatttaatctagatgttcgtaactgagagttaggggtgaacatgcctttaaggatgtagacatttttattacaattattttctccatgtttttgattaaacatatcaaggaaatatatattattttttatttaacttttctaatgtattaatttttggccagtcctacctatcacatgcttcagcaataatcagagctttgatgacaatgtcacattattttaattcagatgttattccagtttgataagatggagctgatctttagaaaacaagtgtaccatatttctaatctttaaatattatattgaattatttcagcctggctcacttgccagtttttcccttttgttttcatgattaaagcaactgataattattaacatagataagatttatgacattaatttatggttttcttcataaaaataaagccttttttttttttttttttttttttttagatggactttcgctcttgttgcccaggctggagtgcaatggcgagatttaggctcaccgcaacctccgcctcttgggttcaagcaattctcctgcctcagcctcccgagtagctgggattacaggcatgcaccaccacaccaagctaattttgtatttttaggagagacggagtttctccatgttggtcaggctggtctcgaactcctgacctcaggtgagccacctgcctctgcctcccaaagtgctgggattacaggcgtgagccaccgcacccagccaataaatccattcttaacggaattttagagcataaatctgagaaaagaaactaaggctgtacgtactaggtctcctatacaccttgtctttcatcattgaatccttagtagttaatacctgcttggaatgtaatgggaattcaataaattaattaaataaatggatgagtgaatcctacagacaattttgccaaggaagaaaataaagacagggtatttttatttctttcggttttttttttttttttttttttttttttttttttcagacagagtctccctctattcgcccaggctggagtgcagtggcacgatctcggctcactgcaacctccgcccttcaggttcaagtgattctcctgcgtcagcctcccgaatagctgggactacaggcgcctgccaccacgcccagctaatgtttgtatttttagtagagccgaggtttcaccatgttggccaggcttgtttctaactcctgacctcgtgattcgcatgccttggcctcccaaagtgctggggttacaggcgtgagccaccgtgcctggccagggtatttttatttttattttatttttttgagacagcgtctccctctgtcgcccaggctgaagtgcaatggcactatctgggctcactgcaacctccgcctcctgggttcaagcaattcttctgcctcagcctcccaagtaactgggatataagcattcgccactacgcccagctaatttttttgtatttttattagagacagggtttcaccatgttggccaagctggtctctaactcctgtcctcaagtgatccgcccacctcggcctcccaaagtgttgggattataggagtgactcacaacgcccagccttttatttcaatttttactgctgtttgttttcttccaaatgaataataaatatgacattttattctgatagctattagattatgaattgaatgtgagaacaaaaggcattctggttttcgtttgttttaatattggactgaaaaaaaaaaaaaaaaactcatttgaaccgggcgtggtggctcatacctgtaatcccagcaatttgggaggctgaggtgtacagatcacttgaggtcaggagtttgagaccagcctggccaacatggcgaaaccctgtctctcctaaaaatacaaaaattagccaggttgtggtggcaggttcctgaaatcccagctactcgggaggctgaggcaggagaattgcttgaacccgggaggcggaggttgcattgaaccgagatcgcacccctgcactccagcctgggcgacagaggtagattctgtctcaaaaaaaaacaaaagaaagtagaacaaaaactcatttgagactttcaggatacaataatttgtttaccttttcagttttctgattcctcatggtgaaggaatcatatctcttcagtgacacacaaacacacacaggatatatacagttatgtgttaacaccagggatacattctgatcaatccatactaaggtaatttcatcgttgtgtgaatgtcacagagtgtacttacactaacctacgtggtatagcgtagtgcagacctaggttgtatggtatatcctatttctgtttggctacaaacctgtacagcatgtgactgtactgaatactgtaggcaactgtagcacaatggtaaatatttcaatgtctaaaacatatctaaccattagaaggtacagtaaaaatcccgtgttataatcaaatgggaccactgcggtatatgcagtttatcattgactgaaacatccttatgcagttcctatcttttcttttgggccacacttggaattgaaatggaagctggagaaaggaagaacatgaaataaactgatgtttttccagccagtcaaaactcagcctctgtgttttagagaaagcattcggaacacagttgagagagggagagaaagagaagtggaaggtttagagggaggtccccgcttgtttttatctcttcaagcagctctaaatttgtccaaagcagaaaaagttgtacttcgcttcactctatattcaagactcaaaccaagattaaacatgaacctgtgggaaagttctttttaattaaactcatgttatttgaaaatacattatggtaagatatttttttgaaagttaagagtcagattttgtctgcataatgaaaagtgactaaggagtgctgaagttatcactcaattatcaggaaatctagaaaaattactttccaataaaaatgagcatcaatgatttctaccacagccttttggttaaagagtaatgaggagaaattctgccatgtaattaaagataatgaaattatcaatcaaggctaagctgcattaggttctttgactaaaataattttatacaattttaagtataaattaagttaaaatatatacattgagtgtgtgcattaatgtagacagtgccaaatattcaacaaaattatttcaccacctttgatttttgttttttgttttttgtttgtttgtttgtttgtttttgagacggagtctcactctgtcacccaggctggagctcactggtgcaatctcggctccctgcaacctccacctccaggctcaagcaattctcctgcctgagcctcctcagtaactgggattacaggcatgcaccaccgtgcctgactaatttttatatttttaggagagacggggtttcaccctgttggccaggctggtctcgaactcctgacctcaagtgatctgcccatctcggcctcccaaagtgttgagattacaggcatgaaccaccatggccggctgatttaagcacctttggaatcataattattaatcataaatgaaaccaaactaaaaataaagtataccacatgtgagaacattccaatgaataaaatcatttctgtgtgagctagcctgctgttcaaatttgtttatgcttatgcttcagataatgtttacaaaagtactgacagattcctagaagcacaatttctaaacacttaccttggaggtttctagggccctaaaaatatttctagtcatttcaaaaaaccacaaaacaactacaaaaaatgtacttctcccaaaggccatacgtagcacatgcaaaaagagattctgcagagcattttggaacgtaagtagcttttgtggttctgtgtctcaaattagcctgttcttaaaagtctgcaaattaaaaaagaatgataggccaggcgtggtggctcacgcctgtaatcccaacattttgagaggccaaggtgggcggattacttgaggtcaggatgtcgagacctgcctggccaacatggtgaaaccccgtctctaccaaaaatacaaaaaaattaaccagacatggtggcatgcgcctgtagtcccagctactagggaggctgaggcaggagaatcacttgaacctgggaggcggaggtttcggtgagccaagatagtgccactgcactccagcctgagagacagaggaagactccgtctcaataaaaaaaaaaaaaagaatgataaattgagtcaaaattataaaaattcaacagacgctggcacagatttgagatttgaggaaccagtaaaaaacgtagtacatattgataaatggcaatgtggtgtcaagatattaaaattggttttaatcttattaaccaacataaaatatggaaaacttatacatttaagtgggcccagaaaaaagtttgcaaatagcattccaaaaatcgatagaataatgtgaatgctttgttttctaatcttcacataatagggttggactagatgatttataagatccagtatatagcccctaataataacccctttaaaaagtctttttttttttttttttttttttttttgagagagtcatgctctgtcacccaggctggagtgcagtggcacgatctcagctcactgcaacctccgcctccctgtttcaagcgattctcctgcctcagcctcccgagtagctgggattataggcacacgccaccacacctggctaatttttgtatttttagtagagacggggtttcgccacgttggccaggctggtcttgaactcctgacctcaggtgatccgcctgcctcggcctcccaaagtgctgggattacaggcgtgagccactgtgcctggcctaaaaagtgtttcaatagaggagagaaataaacaagatcctgaagggataagaagatgtaaaagttgttgctgatgttctgccgcatatttctttccccacccgagttccatgcagtatcttgctttgctataaacaggagtaagccagaaatatgaggggttgtgttaatgtcaccagaagcgacctttaactacgaggggatggaagtacttgaaaaaagcacgcagccatctcatcttctggtgcataattctgaggcatgttcctcacagcttctcagagattcaccagcaggactgagccccagaataatgtgctcattgacacacctttgattgcctccttacctttcctaatctcactttctctttcctctcacttgtactttttgtaatcaattgccagataaactgtgtacctgcacctcaaatccttgcctcagtgtctgtctggggagaatctaaagtaacacagaaggttagcgagaaattgtttcacatgcttaaacaaaacagggcaaaggcacttaagatgttagagggagggagggtgaggaaactcacacgggatgacttcactctgtttagtacctaaaagtgaacaggaggtggatcgaaaggaaacagttagtgaacctgcaaatcaataggaagggttagaagactggttatgggagatggaccagatagcccagtaagtgaagaaaaggctcatggaacagcagagaaaatggacatatatcatccatatattttgtttccatcctagtctaatttacccttagatactacaataatcccccaactcatctttgccacttgtgcttttgtccttttctactcactccatactctacatggcctaaaggttgagcttttaaaaacataaaccaggttgtgtcaatctctgattaaaattcgttactgctctgatgcgtccaatatctttaccaagaaccacacttcatttttcttccttttcttctgcagtcttgctgcatttcagccatactgacctgctgccatttctcaaatgccagtctctgtactgctattgcctcttcctggaatgctctcctcatccatcctctaactgccttgatcgccactgaatatacactaacatgcatattgtcagtcacgcagtagtagcttaatatgtatttgcggaataaactaatgggaaagagtaacagcatggttcagttgatggtggataatagtgatttactgagtcacaaacaacatcatctgatgccttagcaaagaggagtaggtattggagaaagaagacaatacttacaattctttacttccttgagctcattttatatgtgtgtgtgtgtatatatatatataaaacatatatatgacatatatgacatatttttgacatatgtcatgttatatgcctccttctctattatatatacaatgtgttcaaggaagtaaagatgttcaataaagttcaaggaagtaaagtctaaggtgtctttgtatgtagcactgaagtgatcagtcagagtccaggcttggctggatatcgaacagtggatgtgtgaagtagaagtgagtgatgccaattttaaagataatgagcagtttagtaggcaaggatttagtgtcagatatggaggttgtggttggcagtagtagtagttgtactgggaagctcttccacagtggtgaagaagcatgctgagaaaggccaaaaagtcaaagtagcatcttgctgtggataaggagattggcataaatggagtaaaagttgagggtgaaaagtgatgtgagacaaggacaaatagacaagttggcttggctaatgtaatacccatgatgtaagaaaagctatgctgagatagctaggctaattccaagggacttttgaggggagcatatcaggttatcacatgccaaaaatgtttcatttcagagactttagtcttctcattaattttatcgctaatccattcattttcaaaatgtatttcaggatttcacatcaggtcgactttaaatcttttgttcagatgaacgtttcttttcctaggactgagtaagacagtttgtcctatccagtgcttaagagtaaagcaagcttatgttgccactgcaggcaggattattaaataaccaattactattcagactgtgtcacatccctttaaattactcaagcaagagtcttggccgggcgcggtggctcacgcctgtaatcccagcactttgggaggccgaggcgggcggatcacgaggtcaggagatcgagaccatcctggctaacacggtgaaaccccgtctccactaaaaatacaaaaaattagccgggcgtggtagcgggcgcctgtagtcccagctactcgggaggctgaggcaggagaatggcgtgaacccgggaggcggagcttgcagtgagccgagatcgcgccactgcactccagcctgggcgacagagcgagactccgtctcaaaaaaaaaaaaaaaagagtcttgaacttgttcagcctgaacacatctgatatcctcagccaagtataggatgtaaattagatagcttctggctttactagtgtggaatcaggcatgctttttccccttaggactccatgactaatgacctgaattgtctacatttcaagactagtcagatctctaatggtgaacctatttcattgtttctgcttctgttttgtcccgtagtatatgagacaaaggatatttttatgtgcaaattgcaacaagttgagatactcctttaaaaatggattttctttccatagttgattagcgtatggtaccagatttcctagaaatgtttttatgataaaagtttcaggttctcgatgatgcaaggaaattacagacgttaggtaatgatttgtaatcaggacacatgagaggagttgtaactttactgcttaccctgtggctttgagaatcattaatcctcaatgggcctcagttttcatatctaaaaatactgctttttaggttcagttacttcaagggtcaaatgagataaaatatatgtgttataacaataaaatgtaataataaatatgaggtaccttttcccccagctttattgaggtataattgacaaatggcgattgggtatattcaaggtgtacaatatgatgatttgatacatatacattctgaaatgattatcacaatcaagttaattaatatatccttcacctcacatagttgccattataattttttatgatgagaacacttaagatctctcttagcaaatttcaagtaacaatagagtactattaactatagtcaacatgctgtacattagatccccagagcttactcatcttataactgagagtttctatccttcgaccagcatttccccatttttttccatccccagttactggctaccactgttccactttgctttgatgagcttaacttctttagataaaatgagttactttttgaaaaacaagtttaattggcaaaattgtatatatgtattgtgtacattatgttaaaaaatatatatatatataatgtggcctggtgaaattgagctataatagtagtgtttttaatgactatgtagccgaaagttccaaggctttcagctgattgactatgtaattcttaaatctagtagagtatcttctgatttgagagcagtatgaatcctggcagaaaactatgctggctatacacttttaagggtttgaactgtgttactttatctatatactctgcataaaatattctctctcctatacaggccagctcatttattcttgcttttctagtctgattccccctttctggaatctttttcctccatcgacttttggttctaaagcattcccatcttcaaaaattcaattcaagtcctagttaccacaacactttctctaacggcttgaaacacctcttttttctatgaacttttgttccacatagttatttctacccagttatcgacataattgcttgctaattatttcctgtggattaactttgattccataactttttaacttttttatagatttcctgagagcacgtgctgtgctttatatttctttgtaaatacctcagtagctctgcattttttttctctgtcatccaggatggagtgcagtggtcgatcatggctgactgaacccttgacctcctgagttcaagtgatcctcccacctcagcctcccgagtagctgggactaccagcgctccaccacacccagctaattttcgtactttttgtagagatggggttttgccttatcactcaggctgatctcaaactcccgagctcaggtgacccacctgcctcagcttcccaaagtgctgggattacaggtgtgagccactgtgcccggccagccctgtggttttttgtcgttgttttggtttttttgagactgggtttcactctgtctcgcaggctgcagtgcagtggcaccatctcggctcactgcaacctctgcctcctgggttcaagcgatttttctgcctcagcctcccgaatagcagggattactggtgcacgccaccatgcctggccaatttttgtatttttagtagagatgggtttcaccatgtgggccaggctggtctcgaactgctgacctcaggtgatcctctgtcctcggcctcccaaagtgctgggattacaggcatgagccgccgtgctcacccagctctgcatttttgaatcattgtttataaaacattgagcatcaaataatatgtttttaaatattgtataagtaatactgtgttcatagaaacgttttcttttggccgggcgcagtggctcacgcctgtaatcccagcactttgggaggccggcggatcacgaggtcaggagatcgagaccatcctggctaacacagtgatacaaaccccgtatctactaaaaatacaaaaaattagccgggcgtggttgcgggcgcctgtagtcccagctactcaggaggctgaggcaggagaatggcgtgaacccaggaggcggagcttgcagtgagccgagaccacgccactgagctccagcctgggccacagagcgagactccatctcgaaaaaaaaaaaaagaaatgttgtcttttacaaccatatatttatcatatttatcagtagtttaggcgtggtcttgaaaaggaacctccccctaccataatgcctttcgtttaggagatccccccattacacttgtggcttacattgaaagaaaaaaaaaattatccccttgtctatggtagaaaactgtgtcattcgtggctttgactgcatcacaatccattttagctttttgtcacttaacttgagaagaaatgaaatatatgtggagtgtatatccctgaagaaagtaaaggaccagctgttatcactatagagtttgtattgttgctgaaaataatctggttatgtttgtaaggattaagtagtttattcaacagatgtttggtagtaaacatgaatgagaaaaggcttgttcttatcatattcattatgaatgctgaggttgtgctttactacatgttttcaatgctcatcctaactgaaagtatgaagtggaaggatcaatttctgaatatttaaatgagatgttgattgccttgttataaacattaacaattttcctaagtgtttgctcttgagatagagcatctttaggagaactttatgatttgggctggcagatttagccaaattaacaggaatgtaccttcctaatgtgatcattcatccctaggaacaggaatctgggaacactgaggctatacttctgtatggtgagttatcaaagtgttaaacacaggcactattaatgaagcacagattctactttcagagtaaagctagtgttactatctatgaaaaaatattattatttatgttttcataataataacttctacattatatttattttcaactttttagaataaatctgagctaggaggttcttattttagttgttttccttctatcgtttttcattacgctcttgttgtttgatttggtctcacattttaaaaagcttactgtataagaaagttttatcttcaaaataatgagcactagaggttactataaatggaaatacaaaatgtggatttactaaagtgttttgacttttacctacacatttcttggagtaatttttaagttgaattttaagaattattttgctggccgggcacggtggtggctcacacctgtaatatcagcactttgggagtctgaggcaggcggatcacctgaggtcaggagttcgagaccagcctggccaacatggtgaaaccccgtctctactaaaaatacaaaatttagccaggcgtggtggtgggcatctgtaatctcagctactcgggaggctgagacaggagaatcgcttgaacccgggaggtggaggctgcagtaagccaagaacatgccactgcactccagcctgggcaaaaaagtgagattctgtctcaaaaaaaaaaaaaaataataataatattgccatatattcgaattacacaataataccagattgaggatattagaggaaaacaaatattatattttcaatatttctaaagtattttttgtcttggttatttttatggaattatattacatttatagtataacctaactcttaaccattttgaggggtaagtttaaagattaacttatcactattgacgaattattcatctacccgtggaagtgtctgcagtttatccatttcgaaacatctaatattacatgagaatttacttttctcattagattacataaacatcatgttaaaatgcaatatgtacatgtgacaactgatcttttgggaaaaaaaaagtccatgaatcactcctgtaacatttggaattaaattcattaaccaaaataatatcatgcttcatcttttatattttgcttccttagcatctggttcttagtctgtctaattacattataatggctctgtgttacaacagttgctagaagatttttttgggggggggggcaagaatgatgattttgcctcatattttggaatacctgctttgcaaatgtctttcctatatactagagccagaaggaaacaaatctaatgtttcttattcgtttgaaatttattgggagaccaacttcattcaaagatcaagaactctaaaatttttacatcaaaaactatttttttccccaattactttgttgagtactgcacttccagtcttgagatcgaaagtaatgttgaggccgggcacggtggctcatgcctgtaatcccagcactttgggcggctgaggcgtgcggatcacctgaggtcaggagtttgagaccagcctggccaacatggtgaaaccccgtctctactaaaaatacaaagaaaattagccaggcatggtggcgggcgcctgttattccagctactagggaggctgaggcaggagaatctcttgaacttgggaggcagaggtcgcagtgagccgagattgagccgctgcactccagcctgggcgacaagagcaaaattccatctcaaaaaaaaaaaaaaaagtaatgtttagccttgaaattgctaatacaatggacggtatccagcatatttcttttttgtatgcaattaatatttttactttatttattttatttatttttttgagatggagtctcactgttgcccaaactggagtgcaatggcgcagtcttggctcactgcaacctctgcctcccaggttcaagtgattctcctgtgtcagcctcccaaagtgctgggattacaggcacgagccaccgcgcctggccgatattcttactttaacagttgaataagttaatattttattggagctatgcaattagttaatttcatatagtgaatatattaatatcttatgaggaagagccacaattttagtataataatgtagataattataactcaggaggactatgatcaagatacactgtaaggatccttcaccatattttaccaaaatattattttatagttcaaagggggataggacggtacacttccaattatgctgcaaatttgttattattactgaaaaagtctattttcttcttcaagcaattaactattaatgtctttaatgtcaataaaccgcatagcgttatagactctctttgaatttctctgaattagaaataatttttgaataggaagattaacacagactcattttaattctgtaatggtagaaataattaatctccccttatctgtagggatacgtgttctaagacccctggtggatgcctgaaactgtggataataccaaaccttatgtatatattatgtttcttatatacatacacatataacaaagtttaatatatacattaggaaccataagagattaacaacaataactaatattagaacaattataacaatatactgtgataaaagttatgtgaatgtggtctctatctctcaaaatatcttattgtactgtactcatctatttttggactgcagttgatcatgggtaaccaaaaccatggataagaggcagactactgtgtattttattatatgcatgttatatataatatatgtaatatatattatttgtatccatttggcaaacaattgagatttttatttcatgtagttgctttttgtactaatatagttatatggttgttggaattatgtcattaaaacacattaagccaagcatgctggctcacgcctgtaatcccagcactttgggaggccgaggcaggtgaatcacttgaggtcaggagtttgagaccagcctggccaacatggtgaaaccccggtctctactaaaaatagaaaaaaaatcagccgggcgtggtggcaggcacctgtaatcccagttacttgggaggctgagtcaggagaatcccttgaaccccagaggcagaggttgcagtgagccaacactatgccatcgcactcgaatcgagcctgggcaacaagaatgaaacttcgtctcaaaaaagaaaaacacacacgcacattaagagaaattatgtttgtcgttttgtttattctctaatttgattaaattgaacagaataataagtcacgtatggcaataccaaatattatgctaaaaataaaacactgaaagctgaaaaattcaatcacagattattggtttatatgacatcaggcttcaggctgataggagacgtccaaatgataggcttattttgttccataagtattgggcacggttcttagtataacaaagaaataaccgtggattgagaaattgttttcctcaccttcattacttaatagtagaattcccttcaatgtgccacttaatattccttgatgtcagagccttccatttgagcagctgaaattattgacacccctctcattcttcaaggatgtgttgtagggactgctgagtttctgtagaggtttaagctttgtgggaaatgatgttgagtatgacaatgttatcagcaacattgtcaacttcatggttgcctattgacttagggaaaagtggagaaaaatatgacaattgctgagtgcttagttgcagtagctttttaattttaattttcaagcatctgtgtataagcaaaagaatatacacagtgccacgtatcatacccattgacaagtttatcagattttaattataataaatattttaattaaaatgttttttaaaattattaattttaatgaacatcaaatttctctcttgtgatgtgataagggcagtgatagaactgacatttgaacgttcaatacacaattcggccaccattcaataggcttggattgtgcccatggttctgttctgtactaaagacacaaagatgaacaaataaaaactctgcccttgaagccatacagtcaaaatacagtgtccttaatctggggtccatgaaccatgataggaaaaaaattacatctttattttcactaacctgtaactgaaaatttgcatttctttccctttatgaagataagcaacacagaacggtattagcaatatctgtgaatttattaccaatatttttatatcaaatcctagttgttttggatatcttgaaaaatcatatgttaatatataccagtggttagtatactaatcactacttttaatttgtattaattattatgcttataactaatgtattaatagcatataatagtattatattcagtattttacaattgcaatataattaatttcctttgttttttatatgcttttagttttcattttgcacatttgaaaacagtctgggaagtgttccatatgcttcaccagatgccaaagggatccatagcacaaaaatagttaaggaccccatatctagaagagacacaggcaagtacatataataccatggtacagaaaaataacagaggcttgtaccatatgctgtgaaattgggcataactctctcagtccaaaggactgaagaggaaatttttgatttggccttgaagcacacgtgattgtttctctagtggtaacatgtgagagagggcattctaaaaaagagaaaagtaggtgcaaagtcgaagtcacccggtgagagcttgcagggtcagggaacaaagagcagtgtactgtggcaatgtaaacaaacaaagaaacaaacaaaaaaaccttttttttttttaaaccattgttgggcatcctattctgttttcatttgtcaatgtgcaagattgcatttgccaagcagtttttattaatcattagtgagtagaaactattctctggctttttattttaactgactatatttcatatagacaacaggcaagaaacatcaaagaagagatcaaagctctgcattagcgttttaaatctcattatttcaaacaacatctacctgtaaggggaaaaaaaaccgtaaatctttttcacctccccacttcgtcgttgttttcagacaacgatcagtcacttgtctggcctgtgggccataattggctacctgtaaatctcaagagactgaaccatgtaactggaataattttttttttttagcactacactacacggctgttattcagttataatggtcaaggaagctttagatgctgtacttaggctttctaaatgtgtgctttatttggctttctgggagaaatgtcaatgtgaatttccagattataatgaagttcatccagaaaaacaactatgatttaaagaagcagaagaaacaaaccggactgaaaaaatacactaatagactaagatagtgttttcaaactgttctagattaagacaattttgcttgcattctttgttgagcaagaaggttcacatcttaacttttccaataatcctctttaagaccgttattattggccttgatttcaaacagaaaccagcagggacctgaatggacactactagttaaccagtctaaagccttatgttaaagctaaacagttatctctaattttcaaaacaatagcatgagtatatattaaaaagtggttgatctagggaacttaatattccaggatgaactatactaaatgaaaatatgtaacacattaaaatgtggtcaaacaagccatctatagctgatagtacaaattgcatatatatctactttattaaaattttaactggccaataaaattgatactataattctaaatataatttttatttaagattacaagttttaaaattgaacagacttaggtttaaatcacttctctctcttcttctttttttttttttttccgaaacggagtttcactcttgttgcccaggctggagtgcaacggcgcgatctcggctcactgcaacctccacctcccaggttcaagcaattctcctgcctcagcctcatgagtagttggccctccaccatgcctggataattttttgtatttgtagtagagacgaggtttcaccatgttggccaggctggtctcaaactcctgacctcaggtaatccgccctcctgggcctcacaaagggctgggattacaggggtgagccaccgcggccagccaaaatcacttcttaaatgtgttattctgggcccagcacggtggatcatgcctgtaatcccagcactttggcaggctgaggcggtccgatcacctgagatcaggagtttgagccagcctggccaacatagtgaaaccccgtctgtactaaaaatacaaaaattagccggcctggtggcacatgcctttaatcccagctactcgggggtgctgaggcaaaagaatcccttgaaaccgagaggcagaggttacagtgagccaagatcatgccactgcactacagcctaggtgacaggtgacagagggatacttcgtctcaaaaaacagaagacaaacaacagcaacagaaaatgtattattttgtattagcttagctcagcatgtttgcttgtatgtaaagtagaactgaaaaaaaaacctaataaaattaaaatagggattaaatgcactaaaatttgttatttgttctacgtatttcaaaaatggtagtcattctaattatttattttagttaatggaaacattagttttattgttagtaaaacaatatattgttgatacaatatctagcataattttgcctcttaatgaatcaatcagcttgtcctttttattcatattttccttaattataaaccaattttttaaaagtcataatctatcagtagaaatggtactttattaaattcggagaatagtatcatttaaggaaaaatattcctagataaaaaaatatacagtactatgaaattcacatgcatttaaagtcattattaatttataaagaatctggaattataacctgaactaaataattctatttttttgctgaatgaatgaataaataaatgaatctttaggaacttgactgtcctccactaaagttaatgactccttcaacatattacacattctgttgctttgttctcatttctattataaatgcaagtttgcttttttgcatatggaatcaccatctataaattcatagtcaatatggggttttaaataatcattaccatggaaattatacttaagtattagttctgttggttggagattatgaatttctaaatttaaaaaaatgctgatttaaatttattatttccagtgccctatcctatttttttttcatatctgctactgccttcctaataaacttgtttagaaatatatcttgacagcaaatggtattttattcctaccctcttggcatgtattatacacaaactttgttttttgttgttgttgctgttttttttgtgtgtgttgggggggggggggggacagagcttcgctcttgttgccgaggctggagtgcaatgatgccatctcggctcactgcaacctccgcctcctgagttaaagagattcttctgcctcagcctcccgagtagctgggattacaggcatccgccaccacagccagctaatttttgtatttttagtagagacggggtttcaccatgttggccaggctggtcttgaactcctgacctcaggtgatccgcccacctctgcctccgaaagtgctgggattacaggcgttgagtcactgcacccggccttaaacttcttttcgaaagctttctcttttatacgtattgagttaattcctgtttgcgctgtgacatctacctgactaccacaaaaccttacagccacttgcttctgtaaatggaaaactgccctagcatgacaggatgtgggctgaagacataaccatatcgaaaacagcaagctttttggaaatctgtgtttggccctcaatttcatggcctcaagtaacttgataattttctatttctaatgcctgtcagccacaacaggatctgataaccaactaaaatctctgttggaagtgaataggggaaaataggtgaaatcacatttgatgttgtaagggaagcttattgaagacagtggatgtgttcaaaacattatgaggcaaataatgaggaggaaaaaatatgaggaaatagatcaccaggaagccctgtgaatgtttatgttttggctttacatgattactagtaattaaattagtgaaaaatattttatggaatattcaatatgcccttaatgtacaatttgctgagcaataagaatataagactacaaacttcctcttattggaatatacattttattttttattttgttgtacttcaatagctttagggtttcaagtggtttttgcttacgtgtatgaattgtataatggtgaagtccgggattttattgagccgtcacccgagtagtgtacgttgtacccaatatgtagttttttatccctcattcccaccccctccacttctgagtctctgaagtcccttatatcactctgtatgcctttgcatactcataagttagttcccattataagtgagaacacacagtatttgattttccatttctgagttacttcacttagaataataacctccagttccatccaagttgctgcagaagacgttatttcattgtttatatggctgagtagtattctatggtgtgtgtgtgtgtgtgtgtgtgtgtgtggtgtgtgtatctcacattttctttatccactctaaggtggattctatatctttgcgattgtgaattgtgctgcaataaacatatgtatgcaggtgcctttttcatatagtgacttatttttattttggtagatatgcagtattaggattcgtggattgaatggtatacctacttctagttctttgagaaatctccatactgttttccagagaggtattaatttacacttccaccagcagtatataagtgttctctttttatcttgtccatgccaacgtttattgttttttgactttttaataatggccattctggctaagataaggaagtatctcattgtggttttaatttgcattcccctgatgattagtgatgttaagtattttttcatgtatttgttgatcatttgtatatcttcttttgagaaatgtatattcttgtcgtttccaagctttttaaagagattgttttcttcttgctgatttgcttgagttctttgtaggttgtagatattggtcagttgtcagatgcagtttgcaaatatttttttccattctgtcggttttctgtttacgttgatggttatttcttttgctgtgcagaagctttttagtttacttagatcccatttgtttatttttatttttgttgcatttgcttttgaggtcttggtcataaattctttacctaggccaatgtccaggagagtttttcctaggttttctttgaggagttttatggtttcaggtcttagacttaagtctttaatcctccttgagctaatttttgtatatggtaggagatagggatccagtttcattcttccacatgtggttgtcccattttcccagcaccatttattgaataggctgtcctttgcccaatttatgtttttgtatgctttgttgaaggtaaattggttttaagtatttggcttcacttctggcttctctattctattccaatggtctatgtaggaatagacgttttaaaatgttgcaattggaactatggataaacctttaagataataatttttagccactgttcattttaactgggggagaatgggaaaaaagtttaatcactttaactaaatcagttactttgtttacatatatttagctctgataattacaaggagattcacttttgagtttgaaaagtagattctaatgcctaatgagagttttcacattgtctttgagaataaacactattttaggttattactgatatttcagtttgtgaactaataattcagcttgtgaattttacccaattttataaattcacttttcttacttgggcgtctgtgtttgaattaagaatggttaaatgtttctttcatacgcgtccgtgtgaagagaccaccaaacaggctttgtgtgagccataaagctgtttatttcacctgggtgcaggtgggctgagtccgaaaagagagtcagcgaagggagataggggtggggccgttttataggatttgggtagataaaggaaaaaggggggttgttctctggcaggcaggagtgggggtcacaaggtactcagtgggggagcttttgagccaggatgagccaggagaaggaatttcacaagacaatgtcatcagttaaggcaggaacaggccattttcacttcttttgtggtggaatgtcatcagttaaggcaggaaccggcaatctggatgtgtacgtgcagatcacaggggatatgatggcttagcttgggctcagaggcctgacagtttctacatgatagtctctttattcaaaagaaacacactacattattattttaaaacgttattaacatatttttctgtgctagaaaattttaagaaacaaacatttaagtgggctaactcatttagaatttgtaaaatatgacaaaactctaggagaaagtttacctgtgaaaggagtctgttatgtaaatcaatagtgtaattatgattcaataaattatataaattcctaatgagcactatcaatttttcttttgctaaaatctactgatattctacttttaaattactctcacttttagtgttcccctgaggacttatcagtttggaacacttaaatttgagttatcgttctgttcttaggaaaaatatatttaaagaaataatgatttattatgctagatttatcattatttttatttgggattgcttttaatgtgcatgagttacaaagacataactgtgagatcccattttctataatttttttagtgattccatacatttctgagtttacattttttaaaaattatagctcaaaaaatgcaagacataagtaagtatgcttttctaatgggtcatttcagtcgcgtccgtgtgaagagaccaccaaacaggctttgtgtgagcaataaagctttttaatcacctgggtgcaggcgggctgagtccgaaaagagagtcagggaagggagataggggtggggccgttttataagctttcggtaggtaaaggaaaattacaaagaggggttgttctctggtgggcaggagtgggggtcacaaggtgctcagtgggggagctttttgagccaggatgagccaggagaaggaatttcacaaggtaatgtcatcagttaaggcaggaacaggccatttccacttcttttgtggtggaatgtcatcagttaaggcaggaacaggccattttcacttcttttgtgattcttcagttacttcaggccatctgggcgtatacatgcaggtcacaggggatatgatggcttagcttgggctcagaggcctgacaggtcagttatggaaacacatcaaagtactctagaaccaaaagttaatttttgaaagaaattaacttaatgtacagattttataggaattctggacgtatttaatatcgtgatgctagaagaatgtcttaccaattaatattactggatttcttgttgtgtatcaagttgtaacagataccttaatcacctaccagataggctcattcctgtgtccattccaatagaactctgattttgctcagatctccatcctcacaatttcacagtagtcttcagtaaagaaatgagactaccccttgtcacagaaaatgaatcatactttaattcgcttatatgcttccataccacttgccatttacgggtttaagtatgtgcatgagatgcaacctgaaccaattaaacatcaagtaagtttttcttgccaatgaaaagcgttcacttaacaactaaatgcttgagcatttatatgtagatatatatgtacatatatacgatgtaaaatgtagaatgcccactgattcatttataatttgatatgtattagtatgtatttaataagctcttataagactgaatggactctggatatgaaataatataccaagtatggtaacacatggtaacacatggacaaattgtagtggaatcaataaagcattcagagaaatacatcattattatttattctcccactttaggaagatttcaatcctagcattaaatgtaacactgtcttttttaaaataaaacctccatttctaagaagttatttgatgagaaaatatttgagaggttatctgatgagaaaatttgaagaaaaaaattttaactgtacaaccagttaattagaactttgtcaaataacattgcctttaattcccagaaatccaatacattatgctcagtgaactgtaacacctgagtttttaaagtggaatacttaaaaaaaaaaaaaaacaaaaaaaaccagccttctggggtaatatctcctctttggaagtttctttttttccaaaattatacttaaaggacgattcttttaatgaataaattttagagttatctcaaggaataaatagaggaaatattattttatttcaaagagaagaatgtctattgtggcaaacaacaaacctgaaataaataaaacgtgacagtctatgaagtccgtgagcctaaagaacaatggttattttactgtcttagaaaagtttaggaagtttggatttgaattcaaactttaatttgaacttataacgtcaacttgaaatcatttggaataaacattgaaaaccttctttgaaagttttatcaaaggagaaagaatttgaataccaagaggatggaaaggttaacttctgttatctgaaatatcttcaattgccttgagccagtttaaaaataaacaagcttactgatatagagggaaacaagtctaccttgtgaatataatttaaaaaagagaaaaaatgtcatttaccatattatttacttcctcattttagaaaagggaataaacatttattaattatgcactatcaggcactacgcattcaacacacactatcacattagttcttcccaaaagccatttgaagtagtttttctttctttttttttcttcttttcttttctttttttgagagatggagtcttgctctgttgcccaggctggagtgcagtggcacgatctctgcccgctgcaacctccgcctccctggttcaagcgattctcctgccttagcttcccaagtagctgggactacaggcatgtgccaccacgcccagctaatttctgtattttttagtagagacggggtttcactatacgttggccaggctggtctcgaactcctgacctcaggtgatccgcgtgcctcggcctcccaaagtgctgagattatgggcgtgagccaccgcacctggcctgaagtagtttctcttatgcccattcatcaatatagataatagggttcagagagatttttcagtaatttacacaagattttacagctcctaggtggcagaatctagacttaaatttagatctgatccaaaaactgtattttcctagctttagtaggacattaacaatacaagtgcctctttaatatgcttaggaatgcatttttatttatatgtaaaaccaaataaacaaataaacgctgcgattgccaacaaagtatctttaatgtaagaatttcaaatgctgtgcaaaattatcctcactaactgctcttctggtcccacacttgtcacatggctacagaatatactatatctctctttctcttccagcagcttcctagtggccacacagggaccatcctatccataggttatagttgctttttaaaatctaggcatttcctaggagctgatgagattttagaagaggtgatattaacatgaaaaaattggtaggggtagatttctgagatattctatccaaattcaggagttttacaattataatttagttaaatattgtacttgatacacatataattccattaatacactctgagttaattgattttcatttattactcatggttttcattttttgttttttgttttttgagacggagttttgctcttgtcacccaggctagagggcaactgtgcaatcttggctcactgcaatctccgcctcctgggttcaagcgattctcctgcctcagcttcccgagtatctgggatgacaggcatgcgccaccatccctgactaattttatattagtagtacagatggggtttcgccattttggtcaggctggtctcgaactcctggcctcaggtgatccacctgcctctgcctcccaaagtgctgggattacaagcgtgagccaccgtgcccggcttcatcgtttccatctttaacaaagaaatacatgatatttaaagaaattttaaaagtataattttaaaacagagggaaagccacccacagctaaaacatcctttctctaaacagtttattttttccttaataaagttagatattttttggtgtctaactttgcattgtaaaacttaatcattacttacattgctccataatattctgtcatatggttttgctgtagaactgatactgagttggtgtgccccttgtaagaatagtccagtcattttaaaccagcatctgtttggattgggccagcatctcttccagtgtccttgagtcaacaatgccttaatggtttctacatatatttttaaatattacctatagatagttcattctttatcttcttatgttgcgtgtcagagctattacgttagagctattatgtaattttggcttttttatatatcattgcaattaacactcttgtccattaatctgtttgggttttttttgttctctagttgacatcttatgacaaatcaataggtgtgtaaactatgtcgatttttcttggctgtaaaaaacagtaaagaatgcttacagtacacgttgtctttatgaaaggaagttccatttgaagaaataattaaaaaacaatctgttttgcctttaatgggcaagatgaagagttaatgccactatatactaaatatcttaatctcgacatgaaatgagaactattctagagatatgtttctagatagatatggaacaaccacaagttcatacaaaatttgttaattttaagtcatattttggacttttattaactcatatggagtgacgaacaaatccttaattaatagcagacatatcatcatctctggatgcttatctatcagagatcagcaagaaaacaaacacacggcatgctaaaatgggtaaactatgagaggcaataagaaacaatattcaaagttgtgggtagggttaagggaaactaatgaatactgtgatgcaggtggcccctggctctggggacaatagaaagacataacccaccactaggcctaaaaaaggtaaaatgtgagggagcaattactagatcctggaaatggaggagctgaggagagaccgcccaacaagagctgtgacctttgaaaaagaaatacagccacttacaacctgagctcttgcaggtgtaaaaagtagaggtttctctccaaagaaactttcctacccatctaaatgggaataaatagtaacgtctcctagaagcaaaatttattaaacgacctgtgctaacattcttaaatatctactagccgtaataaagaaatcaatgtactttatgttcttagttcccacaatttagcctaaatatttgccctggcatgcttatactggtccaagcacgcattaggtcatagcctgttcctcttccttatttgaaggtgtttttacctttctcagcaagtaacttgtggaaacaagttacttcctccttcctttgttctcctctgcctttgtctcttttgaaaagttctaagttgctagccaatcgggacaaatacagaatgtgtggtcctgttccagccaatggaaaccggacacagcagtagagtaaacatgtcaggttataaatgaccctgtctcctttgttcggtgtactctcgtggcaaaactgctggcgagtgtaccctttctgcaaaaagtaaaaatgaccttgctgagagagttaaatttatgttcgagtgctgtttctttgcagcaccagggaacaagcattctgtttctaaataaacattgtttacatataacacagggaaggagcagtaaagaggatacagcctccacacacctttgaaaagcactcaagttataagtctttagtgccgtgctacttaagagaagggcttgggtttgccctaggttatggttatgctaagctcctcacaatttttataccacatccaatgacagcagacccattcaagcagaattggtttacaccatgagaaactataattcaaagaaagttagcaacttgctcctaggcatacccatattaaccaatattattcagtatatttatatacagcgcagagaacaacaattttaatggcattgtcagtattctttgatagataagcaccagttttgtgatatttaaaaagctattataggtgttgaggcttcgttttctcttccgctaaactgggatgaatctttctgaacagaacaaatacatatattctgtcctatctgggaaagattcaattatgtgttgcagtccaaatatgctgtattatatttacaggtaaaatcatactagcagaccagagtaaataactaggtaagttcctcttagtgacaataaaaagttatattgctcagatagtgctaatagaactttctgcaatagaaatgttctgtatctatcatgaccaatatagtagccaatagccatatgtgactattgagcccttaaaatgttactggtggggctgggcatggtggctcacacctgtaatcccagcactttgggaggctgaggggatgaattacctgaggtcaggagtttgagaccagcctggccagcatgatgaaaccccgtctctactaaaaatacaaaaattagccgggcgtggtggccagtgcctgtaatctcagctgcttgggaggctgaggcaggagaattgcttgagcctgggaggcagaggttgcagtgagcccagatcacaccactgccctccaggctgggcgacagagtgagtgagactctgtctcaaaaaaaaaaaaaaaaaaaaaagagtctcatgtataaatactgttttggacacacatcgttagaagacagtaaaggtgacactgtaaaaattttaaatcattaataactaattaccaccccaatgtaaatttcactgatcactgtcagtattaattctacagtaacatctgtatcaacaaatttccatatccctttcactggtattagggaggagatatcaaaagatggtaaacccagagcataaacttgtagatgtttggtaatgaaatgggactggacctatttgagattgtttcacaattttaaatcagggattggttatatagagctttctttcttgtattttttttctgcttctatgtggaaccatctagaatgcttgtgttattgctttaaggaaagtttttaaagggattcttaaaaaatacagtattttcctagcatatctctgaggtgataaaagtctaagaatcatagtttatgtgttttattcagatccagctcattctctcaactgttaaataagattcttgagaacaggtattattttttacattctggaggatccttatagcacatagaactatactgagaccaaactcgataatttcttataattttgattctgctggtaaaacacaaacttgatattgaaaatttgaatattctggacattataatttgcttatgaatcattctgtttgatattcccagataccctttgctaaggcagctcagaagggaaatatttgttcttgcagtttgtgtggttacgtggtttgttgtaaactttccctttgacctaaagaaatattgtccctttggccaggtgcggtggctcgcgcctataatcccagcactttgggaggctgaggcgagtaaatcgcttgaggccaggagttcgagaccagcctggcccacatggtgaaaccccatctctactaaaaatacaaacgattagccaggtgtggtggtgcatgcttgtaatcccagctacttgggaggctgaggcaggagaatctttgaatctgggaggcagaggttgcagtgagccaagatggtgccattgcactccagcctgggtgacaagagcaaaactctgtctcaaaaaaataaaaaaaaaaaaagtcgtctccaaaatatagcatggcttcaaacagatcgcattatctctctgaaacattttaacttatagatttaaaaatatatcttacagaaacattatttagaaacacaactttagtttacctacctctataaaatctccagagccagagtaaagattaaaatatgcattcacaaagagctttttaaatcatctctttattttacatctcccaaaaattctggaagaaggccgggcgcggtggctcacgccagtaatcccagcactttgggaggccaaggtgggtggatcacgaggtcaggagatcgagaccatcctggctaacatggtgaaaccccgtctctactaaaaatacaaaaagttagccgggcgtggtggcaggcgcctgtagacccagctactctggaggctgaggcaggagaatggcgtgagcccaagaggcggaggttgcagtgagccgagatcgcaccactgcactccagcctgggtgacagagcgagactccatctcaaaaaaaaaaaaaaaaaaaaaaaaaaaattctggaagaagtagtgtttgatttagcactcttaagggacaccatacatttgatgttgttaaaatagcttacaggtttatattagatttctattatctatcctgtcttcatttttggatatcatgtaaatatgttagataaataaattgagattgatttctaacaatttgtatgcattttgagatggcttagaaaacattcaatgcagaagttgatactgtgactcataccaagcatgctcctttgaatataagaagacaaaacttctgaaatgaggcaaatttaaaatatgacaggtttatattctggaggtagtgctaatagcccccaaagctactgatacatgagtttgtacactacagaaaagagaattaaaaagaaagtttgcacttcattgcagttccactcttgattattaatataaatcgaatgtaaattagtgaacttcctgtaaacacaacatgagcaatgactaatattgatagtctactcttaggttcccttgaaattgttctgcttgtctgataaaaccataacaagggacataaaaagattgttttaatatgttgagtgaattgtacatgaaaaattacattcccataaaaggctgatctatgaatgctaacatttatgttgttcgctatttctgtgtacttataccacccgtgtgagtgttgcttgatttggcagaagtaatggaattttaaaaagcagttgcatgagcaaatatatctattttccatatgtacatatttgcaatttagcaagtcatttgcttttgtttaaatattcaaaacgttgtcatatgtgtgttgtacacattaagattttatgtattttaaaaattatatatgtgtattgatatatttgtatgcacacagagcaaagcttgaaatagcaaaaggtaattacatgcatattgtatatactactttgtattaaaaatgtagtttattgatctttaaaaccaaatttgtttttgtaataaagagtaataaaaaattagattatgattttttcctttcaaatatgtttagaatttaaaaatcttggctacccctttaacctaaaatctgtcttacttacctcaaaatgcccttgatcccaactacatgaaatttcttgctctttcttttttttctttttttttttttttgagatggagtcttgctctgtcgccctgcctggagtgcaatggcacaatctcagctcactgcaacttccacctcccaggttcaagcgattctccctcctcagcctcccgagtagctgggattactggtgactgccacgatgcccagctaattttttgtatttttaggagagatggggtttcatcatgttggccaggctggtcttgaactcctgacctcaggtgatccacctgccatggactcccaaagtgctgggattacaggcgtgagccaccgcgcccggccttcttgctctttcttaaatatattatgtaattttatatagcacatgcatatttctgtgtctgggacacccttcctccctgtatctactccttgctatttcttctagcctaatttagatccctctttctatgtttctctggctcttttttcttaagatttgtcaagtcatgctgaaactattgccttgtctttctcaaaagactgtaagttcattgatggcagaacttaagtgtatattagtatctcccagaactcactcagggcctggcatagagtagcataaaagtcagtgttgttgaatgaatgaagaaatgaatagaatgataactgctttctacaggtgattgtgtgtaaacaaaaagtcatatgattaatccttctatgagcaaaagttggctaagattacaattaaatctgaatgtgaagattgtactgcagaaaaaaaaaacacacattttcaatagttatgtcacaaaagcaacccatcatgatacaagtagaatctgcgaacatttcttttaaggtgcgtataaactcatggcaaatttatgttgcattagtctttttgatgttctgaactttcataaaaaatcaacatagtatttaaaatctattgtaaaatatattgaagtttcattgattttattaaaatattaattcctttattttatatctatatataatataatcaaatctgaaaactcatcaagattatggcctagttgattacgtcttagttattatttgtacttttccatagccaacatgcaataaaagtttggttctagataattttttcctgttttacaccgtttcaatcaaaacatgttacaattgagtaaaacaatctgaaccagccttttataatacatgaattccaagattgtactaatttgtcagtttttgcttactgtctttcacaatgatttggagacataataaaatgtgcaaccaaattagtgaaaataaagaagtatatatataattgactagagccaaatatgtatgcagatttaaggcctgatgttttagttcactcattcaaattttaattaaaaacagtacataaaaggtgctagttgctggagtatgatgagaaaacaaaacagtaacaagacaaaaactgaaaacatgtttcctatccttgtgaaacttactgtcaatggggaagacgtacactcagtcagagaaatgttaatatttacaacgtaaagtaatatttacattatctgtattcagaaagagaatatcaaggaagcctattctgttggagtaaagagcttatgcaaagctcctattgtgggaaggaacagaaaggccagggtaactatatctaagaagaaaattacaggctgggcacagtggctcacgcctgtaatcccaacactttgggaggccgaggcgggtggatcacctgaggtcaggagttcgagaccagcctatccaacatagtgaaacttcatctctgctttaaatacaaaaaattagccggacgtggtggcgggcacctataatcctagctacttgggaggctgaggctggagaatcgcttgaacccaggaggtggaggttgcagtgagctgagatcgtgacactgcactccagcctgggcgacagagcaagactccatctcaaaaataaataaataaaataaaataaataaataaaaaagaaaattacggtgctacaagacgaggaggaactacacagaagcctcttcattcaagaaatgaaagctcctgagttcggatatctatcttaaaagcagtagtatgctattgaagaattgtaagcaaagggtgtcttgatcacattcatctgtcaaatagctctttattggtgaggttatgagaatgtattgaaagtaatgtaatcaaagcaaaagaggtcagttgcttggattaagggtgttggctaagaagataaataattgattcgtatgttattctgggacccctagaagccaaagaaaacggaaaataagaccaattataaaattcttattttcagagacaagaaatgccttcaggaaaagggaatttttttgtataattgtctactaaaagaaaatgttcacttatgactttagtgtatatagaccaatttatttagctttaaagtgaaattaatttcaggatatttggtagtaagttttagcaaaacctaaagaaaatagtaaagcacacatttctgttattgatacataatgatcagatatatttccatgataaatgtgatattataaagcacaacttttaaaaaacatttttctagagattatgccttaatttcagcctgtggaacatttctttaggagatattcatggctgctctgtgtccaactacatttgggagtcacctcatactgaatccttttatatactgggtcacttgcaaaggcttaattgagcatttgactgtcatatgccacagaatggatcggacactataaataaaacacaaaagagagtttgtcttttctgggcttcatcttcttaaaaaaatcagctattagacaagcatatgtaagtagtcaagaattatgataaattttctaaataaaaataagtgcatgagagagcgtaagagtatttatttaattcaggtttgggatcaggaaggtctcactgtggaatatttatctaaaatgtaaagggtgaaccaagaaaacagtgatgtggaagagcattagaaaatctggaagaaacacatgtagctgaagcaaagattatgcttattttgaagaaccttttagctgcagtaaataaaagacaccaaattacctccaattctgtaaagcagccttcatgactattcttcactttgttcacaatttattatctccagcccgtactaaatagataacatcatctcctacttcactgggggcttgaagggagaaaacagtgaactaaacttttacaagacattatttgtccagctggaaataaaaagtagaaaaaacatagaactttctatgtatagaggttataaagaccttaattgctttttaatttgtttagttcatgcatcctttgtcagtctgataaaagctgtgggactcctcagaaaaatacacagtgaatatcctttacatacaaccttttacataaaaatccagcagttcaaatgctcctgcaatccattcataagccattcataatccattcctaaaccagcttttggttaagtatccctgctttcaagtatcttgataaaatagtaaaaggaccagaagatacataaatataaatagaaaagtaaatagaagtgtgtgtctgctttactagaattttgaaatatcatgtttaaactataaattttaaatttagtttatggcttaagtacagatcatatattcccataaatgtgagtatatacatttatgtgcaaaccttcgctcacaaactcatatgcttagtgtttgagatttctcagtcctggactgagagttgggaaaaagttatgttttctttaacattctctcatagaaccaaaataataggagaatcagaaaaacataggcctttacattttggcttgagatcagcttctcgccatacctctagtacctcagacaaattacttaacatgtttgtacctatattttatctactttaaaatagaaaagaatacctaacacaaattgttcttatgaggataatatatgaacattgactgaaagatttaagctttttttacttaaaattatcctgttatagatagccttttctcaagaagtacataaaaataataatagtaaagctttgtgaccacaaaaagctacctacagtatatgtatgatgtttaacatatataacttgatatatataatatgacatatgcttgatatatataattagacatatgcttgtctaatagctgatttttttaagaagatgaagcccagaaaagacaaactctcttttgtgttttatttatagtgtccgatccattctgtggcatatgatagtcaaatgctcaattaagcctttgcaagtgacccagtatataaaaggattcagtaagaggtgactcccaaatgtagttggacacagagcagccatgagtatctcctaaagaaatgtatatatataatatcgagttatatataatatatatgttataatatagaatagaatattctataataatatagtatagaatagaataatattctatactatcatttaatatgaaactcacatagactatatttgtagctgtgggtaaatacatgtatgtaattttggtatatatacgtggcttatgagggtttttatggagacatgaatatggtgttaactaaattattataagtccaatgagctttgtgagatggccagtcgaagcaaacaaattccatgtatctccgaagccatttcctctagattgactgaaaaaaaatcaatttcctttaataaacatattttacaagctttgtagctatcacttacttcgtggttaaagtttacatctatggaagattacacagtaactttgtgctcacatgattgagtatcttaggggtttttatagatacatacttaaatatgtcagggaacttcatagttgtatgattggatgtactgggaacttcttgctccttctccttaatttgtgaaatcaagagacagagttactgcaaatttaaacttgagtaagtcctttgctctacttcatttttctcccgagaggcttctttttttttaaacgtccttttgtagaggcaaaatgtaaatattctctgaactctacttctgtatcttaccgtgaagaataataattagctcattaatttcaatttttgtaatatgcttaggtcaacaagattacttctaagggctcctcatcaaatacccctgtgtactttaggttcttttacttttagcaaggctgattcaaagttttttaattcataacttttttaaaaatttttccgagagtcacattgtatctcctttatactgacgtttattatcaggctgtttttttttgagatggtgtctcactatgatgcccaggctggcctggaactcctgggctcaagttattctcccacttcagtcccccaggtagctgggattataggcgtgagacacaattcctgggtttatcattttgtaaagctggagcaatcagttaagaatggagaagcaacagggccgcacggtggctcacgcctgtaatcctaacactttgggaggccgaggctggtggatcatgaggtcaagagatcgagaccatcctggccaacatggtgaaaccccgtctctactaaaaatagaaaaattagctgggtgtggtggtgcgtgcctgtagtcccagctacttgggaggctgaggcaggagaagtgcttaaacctgggaggcagaggttgcagtgagccgagatcgtgacactgcactccagcctgggtgacagagcaagactctgtctcaaaaaaaaaaaaaaaaaaatgaattgagtagcaatagatatcatgagcctcctcatggcgccaatattcgtttgaacccgccaacttcacatttagatatatgtgtctacgttgctggatgggccaggctatttgctcatctctcagttattttactatcctgtttcatctttttccataacactgttacactcacctttttgtgtcacttttaccagagccagtcattaatgaacaagaaatgtctttatttcatttcaaaaaagcaaaatatttctttgaaaattaaacagttaatttccaagccactcattaaagttattttattataagttttaatatcagaattataaaaatatttaatatgtcatctggtaattaatatttattcttttttttgagatggagtctcgctctgtcgcccaggctggagtgcagtggcgcgatgtcggctcactgcaagctccgcctcccgggtttacaccattctcctgcctcagcctcccgagtagctcttagcagcttcttaattaaagaatccatagctctctaatgcacatacgattgtgacatatttattcgttactttaagatcctcccccagtgttgaattctaccaattgcaaggtgcttccatggctttggacaaagtacagaagaattaaataacttcacagccttcatggaattcacagtaaggcagatcccatattaactcaattaaaatatatttagtcaaagccagatgcagtggctcacacctgtgatcccagaactttgggaggcggaggcggatggatcatttgaagtcaggagttcgacaccagcttgatcaacatggtgagacccctgtctctactaaaaatagaaaaattagctgcatgcctgtaatcacaactagtctggaggctgagacaggagaattgcttgaatcctccgggaggtaaaggttgcagtgagctgagatttcaccactgcactccagcctgagtgacagagactccatctcaaaaagcaataaaaataaaataaaatatattgagttgaatactgaaataggggtaactttgggaagctatgggccgcaaagcagagaatgatgcattcagtttgggggagctaagattagtttcgtaaaggaggtgacatcttgaagacatctagaatttcaatagacatagaaaaaattcatcgtaagcagagggactagtgaatataaagaagtcataaagatccaaaaagaactcagaaataatcaagaaggtgagggtagctacatcataattataagagccaactttattgagtacttcctttgtcaccatgtgctaagttctgtattttaatatcctcattgaatgcttgaaataatttctatgaagaaagatctgttttatctttattttactgggaggctgtgaaatatgcctaaggtcacacagctatcacatggcaaaaacaagattcaaacccccacagtttctaattttaaagcctcagcataatgaacacagtattgtactgaacagaatgaatgaatgtgagtagaaaagacatttctgagaacaaagctggaaatgtatcatacaaatcaaataaacatttcttgagaaatccttggggaagagggcaatataacctctcaaacagtagccagaatcatcaacacaaatatgtattttaagttctcacaattggtctcgccatatgaactaaatgctagatatttacttgcttaatgctaccaatgaattttcaaatctttccaaggtgttaataattttattgcttttttataccaagagcaagaatcaaatgttagttgctattgatgtttacattttaaataacaactttaatttagcctacaatatttagcaattacacaggaatcctctgaaagcttttaaccagccccagaagtaaactggctttggatgctaatctcttgagctttcctgactgacaagtttcctccctagaggaggggaattggcctgtctcctaaattttgcatggcctaaagcagtgagtttagaagcacctgtgtttcctggcaacaaacataacatttgtggaaaagtctaattatttaaattcctctgcatttttctaattgaggataaagtgctgcattctaccttcgcattcttattttattccttggccctttaaataaaaaaatacataaaatgatgtggtcagctaaaatatattggacaaacaaaacccccttcctttatctccctctatcgctctctatgtatatatattatatacatatataaaatatatataaacatatatatgaaaacagatatttgtgtgtatatatacactaagagatattatagtttaaatattttttaacatacactttaaaatctaacagcttggattttaatattgggtcagtctttctaaagtgtttaatattttagtttggaagtattaattagcaattcatgaatgagtaattaaaagtgctttagggggcctttcacatcctataataaataccaaaccttttaccacatttcatactataaaatcttggaaccccattatataactatgagttattaatttctgttacctacttttaaaatgggaacatatgttattaacaggtgttgctttgaaatctatattagcaaatgttctaccttataattagtttttgacttatcacaaaaaagtattttattttttttaattacatagtcacatttcaaggttaactttaaaaaattctaaattatctgattttcatgggaaagagatttgatatttgtgccttagcattttggtatttttctctttctgtatagcaaacctttgaatgatagtctgtctgaattcacagtgaagaaaatgatcagaatattgactgtcaacagataatttagaaggttcaatcctatgataatcagggatattttccttatgtaaatgtgttgatttatcaagttcagctatgtcattgattacatctaggcttcaggccttctgtgaactgccagctctactcaattctggcttgtgaatgttatcacatattttagtcaaatcagaggttatattatacacatctgacatttttctctttgtactaataactttttttctttttttgtttttacatcatggcataagatcaacactaaattttaggagtgcatagtaagtattaccatagtgtaatgctatgccaattgttttctaacttaatatttgcaaaactgggttttatggttgtttctatgcgaattgagtgcctctacagaattttatccctgagagtatatgagtggtgagtgataagagatactgaatgtctcagaacatactagcatctgacagcctattggtaagatagtgtaagtaaagaggataaggaaaatctgacttgaaaggagaataaaatctgattggacagtctgtagccaagtttgcatattatggatttacaaaatgaggttgttttgaattcttgattaatgaaacataaactgagttgttttaatattgcgtgccatttgaaataaaatgcattttgtcacaaccctagaaatgggaggttatgtgttgtaaaatattcttgttcccatctagaagacaccatattttatagagaacagtggctgaagcttgttttactaggaacaagtatggtgtaaggaaataacaataattaatactggtggcacttagtgctatagtaaaagtaaatttctaattagaaaataattaccataaaatactgaattatatctttgtaaggcctttagaaattgaatcactaatttaatatataagtaagtcaatattatttttatgagaaaatggacaacttacgaagttgttgttatgttttcaggccatattccatttttcaccaaacaagttatttccctgatacactcacttaaatcatcagtaatacatataggtttaaaaatgttttgtacaattctgaaagcctatcttagtttaatgaaacataataccataaagcttccctttcctccaacatttgagctacaataaaacaaccttgtacaactgataacaattaactcaccacccccaccccattgcagtcattagaattcattactaaaagctcatttgtttatggtaaaataaagtataagggttttgaaaccaccactgcaaaattaggactgagacagtgaaagagatctaacttaactgactccatcttgcttctaacctccactaatttatagtttatcgtttaaacaaacatcataacagccctttcccaaagcagaccttcttgcctggggactagattgcctctgtaggactaacatcagccacagtattagaaattatggtttaggagtcatgcagctggaggcaacaagattctgacccccaccaaactgctcctaagatcagtgcttgagataatttgcagaccctgcacttgatggatcagctggcactacccatatcaataaactggctcatctgatcttgtggcctccacccaggaactgactcagcgcaagaagacagctccaactccctgtgatttcatctctgaccagtcagcactcctggctcactggcttcccccgacccaccaagttatccttaaaaactctgttccccgaatgcctggggagaccgatttgctgatttgagtaataacaaaactccagtgtcccacacagccagctctgcatgaattactctttcttcattgcaattcccctgtcttgctgagtcagctctgtctaggcagtgggcaaggtgaaccccttgggtggttacaaatttgggggctcacccaggattgcccctgtggctacctgcctgttgtttggtggccccctttcagtgatggatccagaaggcagcccaagtggctgcctaattctcttggactgggggctgactctgttactctgtctactggtggggtattccaacccaatgtgcgtggacttaattgcaatggaaaaatagtcatggggagatgtcccttaactgtagccctattacagggtatctgtagcctcatggtggggtgtctatctgtagctccgttttggggtgtctggattggtgagtatcctaggtgctgccaatgcctgcttcattctcctgactggttctgtagccctatggtggggtgtctgtagccccattgtggggtgtctgtagatccagcatggggtgtctctgtctgttactccattgtggggtgtctgttcagctcctgggaggtctcagttcgctctttctaactagtaggaagactactggtttgggagacttctcttcaatcaggaagattttgaggaggtttctcatacagaaaataggaggatagtttggaagggatactcttggacttcttggttagggatctgatttggaaggccttctgtccctcttgtctttgcatgtgtttaaatatgtgaaagggatctcagaaggggttgctgatagaagtccagcatgcctaactcagagaaccctccttatttgtctggtcacattcagtgagctctaaagaaggctcaacagtcctgtctctcagggtgactatctgctctttcccttgcccagagacctcattgtgaattaccgttcagaggtcatccgtccccacctggtgtggatcaaagacaacagggaccaagatgaaaaattttgagctttgccaggctgatattgggtgcggaaagaggtgactaatgtctgttttgttatgtgtattttgctgggttggaaaatgttaattcagttccccatgcagcccgttgggcagaatcttgcaaattaagaatcttgtttatggttccataaaatggtaaagggtgattttatcttgtaaagtggcttaaaccccacagctatagcacaagcaagcagggtcgtaagacgccactccgttcttctggaagctgcagagaaagggaacccagaaacctggcatcccagcaataagggtaagaaattcttatcagtcaagtttctggtctctctctctctctctctctttctctgcattgttaaatagtaaactatttgtctcctctgcaagggtttggttaatagaaagaaggatttgtgagactaatcttagcacatctgatgtagtttgtgctaagaatttgtctttctgtgttatgtaatggagagagggatatcacgtgatagaacgtgggttaggacacccataagtctgcttttcaagtcagcttgggaggctggtcagctacaaactttgctacaggtccctgaaaccaatactctatgaaatttctctgtcttgttttgtgtccttaagagcttaaccttgtgaccatgtggggatactttcttttggtttctaccatccagaggacaggaattttggggttcatgtcatagttactcctaagatttttcttgagcagttaaaagccttgcaagcctgaaactggcttctctaggctccttctgggaaaagcagtagaaatttctcaacgctgtatatagctcagtagctaaggctttgtcttttgacagtggtggcctgggttcaattgttggcttctggaatgattcctttctgatttgttatttgtgtagctttgccatttattaagtttcttttctgatttcctctcttgaattttcctttctctggactaccttgtggagattctaaatcttgtaaaaagaaacttcttactatgtctttgcagcacctaggaggtttcctttggtaaagttcagaagctaaaaatattgtccacttggcatggctaaaattaggtaataagagatctaaaagaatttcttttttaaagagcactatggttaaaagtcagcttaattaagagtggataaacaagctatagatatatttaaaaggcctttatgtttttctcttcttggaacttgtttttttggaaaaagttttttcttctcagccgactgaattatttttctccatttttttctcttttttaatttttttgtcttgccactcttaacgcacacgtgagtccctaagataacttctggtagcctgggactcattgggaaaaacagaggaggcaccacagaacccgttttagggaaaaaaaaaaaaaactgttttccacatgaaaccccaggaattaaaaacagatggatccctctcaaaatcaaagactctgctctgtttttcattgtgttatctgatggttttgagttttggggatatcagaaattacttcacattatgagggagctttagtgtgtaataactagataggaaatatactttaagggatggctaatggtagttatacagggatacttgactctttgcacacttggatccagagaagcatgcttttggtcacccggaagataaggaaacattcctcaccctccactgggagatcagactcccatgaaggacgggctgattacaaaatgggctgattgactttgggttgccttgcaatgaaatgcagggtatggccgggtgccgtggctcgtgcttgtaatccaagcactttgggaggctgcactttgggaggccgaggagggcggatcacttgaggtcagcagtttgagaccagcctggccaacatggtgaaaccccgtctctaagaaaaatacaaaaattagccaggcgtggtggcacatgcctgtaatcccagctacttgagaggctaaggcaggagaatcccttgaacccaggaggcggaggttgcagtgagctgagatagcaccactgcactccagcctgggtgacagagcgagactccgtcttaaaaagaaagaaagaaacaaaaataagaaaagaaatgtagggtagaagcactgtactgtcttctcccgtagtatttctctccttttgggttgcagtataaaatggtgcccttaatttgggagttctgtctttgccttcagctgtgattaagccttagaaatgcatactttcctggccctgttcctccaaaggctccaccctgaagccagtaatctgattaagaaactggcaaataaaaagtcttatcagtgccaaatcttctgtctgtatttacatgtgtttttgtgtgtgtgtgtgtgtgtgtgtgtgtgtgtgtgatgtttataaaagagctctgattaattggcttggaaaataagtgcttaaataaaaaaatattttgtcagaaaaatagaaactttgatgactttttgttcacatgactttagtaatcttttggcaataaagacaattttaaagattattgttaaagtaaaatatcttgaaaatgtagacatttggtctaaattaaggtcagctatcagatttgctaaattctttaaggtcaaactgtttccttgactttggaaaattgttcaatttatttactttggagcattatattatagatgaggcctggggacacgtggagagctatgcccctagctatgctgaaaagagtcagaccttatcttcacttctgtctgatgtcctaggctccatccctagcatataattaaaatagcttttttatcaggtttttcactaaaaatcaaagttgctaagagttaacattgtaacatgaaatcgaggttactggagaaacagttttacatacaaggtgtgtagggaatgtgtttttggtgaaagataataaggcataggaatatggcttttgttgaagagaatgtaattttgtctagttcagaggttttaaagactgtcttaaactaaaagagtaacggaacgaaactgagggtttaagcaaagtgaaaagggtttatacagggttgatcctgaaaaaaaaaattctgtgggtataaacaagttggctaagatttgaaaaaggttatttagctttttctataggttaaaatattaaagtcatactgtggggccagaatctgggcccatgtgtccaaataacagggtcttcttagaaaattgatctgctgtttaatggaaaattataaagcgttctaaaaagtttatgagaatgtcaccttgtggtcaaactaattaaaactggatagatacataaaattttatttaaaaactagctttagcattaaagatgcactaatgcgaacatgaaatttggttttctcttttgaagacgatttttttgtaacgttaaaagataatgaaagggtttggctttctcctttgggtaaatggcaggggaaaaggggagagagaagagacaaattcagttatcctcatgctgtctttattgggtcttgtttggaaagctaagtctcctctgtcagaataaaggtttttcttttaagattttggagttatcgttttggtcaaatgaatgacttatggtgacctgggattctattttgtgatatccagtgttttaaacctttgatatttggcaaactttccaaaatcaaattataaattatgtctctttctggcctaatcttttagatattaggtcctctaaagtccaaaaatgacatttggcgtattttgcataaaaatcatacaggaaacattgtcaaatatgaaatggtgtttggctttttgggggctatatttgtgtaaatatatgattgacatatgttctgagattatgtaaaactcctataattctaatatgacttagtatatgttatcagtaataattgtaattatgttaaatggctatgtgccacagaggtaacaaatttccttgtcgattgtgtctttaactctggctactctacaatgtttgtgtcgtccacaggcaattgttgtctcatttttgtcctcttaaaagatggttttataggccgggcatggtggctcatgcctgtaatcccagcacgttaggaggccgaggtgggcagatcacctgaggtcgggagttcaagaccagcctgaccaacatggagaaaccccatctctactaaaaatacaaaatcattcctgtaatcccagctactcgggagaccgaggcaggagaatcgcttgaacctaggaggcggaggttgcggtgagccaagatcatgccattgcactccagcctgggcaacaagagagaaactctgtctcaaaaaaaaatggttttaataccagctgtaaaatgtaacaggtggtcttaaatgcaggtttctgattaataactctggagattgtgacgttagaatagaaggaaaactttcaaatagaagagtgaatggtgtttggttttctttggactgtatttgtataaatatgttattagtgtgtgttccaaaaattatgggaaacttctataattctgatatgatttcactattaataattataattgttatgtaaaattgttgtgtgccacggaagtaaccaaaattcctagtcaattgtagctttaataatggctgtagacttttgtcatccacagacattttatcttgctttggtccttttcaaaaggcagtttataatcggatataatactctgagtgcaggtcttagataactttaaaaattatgctcttggaatagagggaaaaaacatctaaatgtggcaaactgatgtgttaaacattgctaatccttttgttttcagagtcaacataacttatttctttagagctatttgccacttttaccgagtgagtaaaatacactcagtgacaaattttggagcaaatttgtttctctctacctgatttctctagaatttggaaaccatttgtgagtattctcaatttatgacagtatagttaattgcatacgtgcaataagaatctgttttcttttgtaacaggacaccattggagaaattggtcattttaccaaggctttgactggaatggcatgcttcctttaaagaatcaaagttgacttatagagccatttaaagcccgttggggaatctggcctcataccttgtccacacagagtccctgtacaaggttcctgacctgtggtaagtaaagaatgtcactttctaacaggcccaggaaccccaagttatcttgggacctcaagaggagaggactttggtcaactcataggtatttgagggtacaaacccatggctgggctcggctttcaaaaagtcttatctgagattcttcatggaacagagttccatcaaagccaatttaaaaagcctaagtgaaaaataattattcttgctgcacttcatgcaaataatcaggccaagtacagtaagactaaaatgcattttataagcaaatcatttctatcatgatttgtttttaataaaaatggggactgaacagagaaatattatgcttcaaaagaaaatctatagtaaactattagctattcttgaggttaattcttcagtttagactaaattctaaattgtttgtgggttagaagttcccaaactaatgatttcaaatgtttgcttttaaaattgggaattgtacttctcatcctaggactcattataccttatagtaggctattcacataaacactgtagtaaaactatagatgagagtaataatgtttctgccacgcaagccttggaagcccaattaggcctgcatgaatccactcaaacagttgcaaagcagttccactcttctcaccttggagttcgttcccattcccgctacttcccccatcagcaggaagaagccagagcgatcgacggccttttcccatctttatagcctataccttagggttaaagtgttagaaaacccaaaggaagggattgaaaccacctttgcaaaattaggtctgagacagtgaaaacaatctaacttaactgactccatcttgcttctaacctccaagctgtcttcgttcattcctgggcataggctgaactaactttgggagaaacttagtttacagtttaaagatggtaacagccctttcccagagcaaaattccttcttgcctgggacttgcgtttgtaggactaacatcagccacagtgttagaaattatggtttaggagtcatgcagctggaggcaacaagattctgacccccaccaaactgctcctaagatcagtgcttgagatattttgcagaccctgcacttgatggatcagctggcaccacccagatcaataaactggctcatctgatcttgtggcctccacccaggaactgactcagcgcaagaagacagctccgactccctgtgatttcatctctgaccagtcagcactcctggctcactggcttccccccacccaccaagttatccttaaaaactctgctccccgaatgcttggggagactgatttgagtaataataaaacttcggtctcccgcacagctggctctgagggagttactctttctctattgcaattcccctgtcttgatgaatcggctctgtccaggcagcaggcgagttgaacctcttgggcggtcacagttttgacctagtaaagctttcattttcttgctttgccctatggcctaatttataatatacataaccaaaagccttagcttctagtaaatagtatttattaaagtgctatataaacgttacattttagggtaaccaacttttcttgttttatttttgtttgtttttgtttttcaggaatttctcagttttaaaatttaaagtcccatatcccacaaacctgcttagcccccaggcacaccagacactcgatcaccctaaagttctagtttattttgggatccttgcatcccttaaaattacatacaagatgttgggtatacatacatactgcaattgccatcaggttcaccttgcccactctctagacagagttgatttatcaagacagggaaattgcaatagagaaagagtaattcatgcagagcaggctgtatgggagactggagttttattattactcaaatcagtctccctgagcatttggggaccagggtttttaaggacaatttggtgggtggggagcagccagtggtcagaagtaatgattggttggatcagagatgaaatcatagggagtcaaagctgtcttgccctgagtcagttcctgagtggggggtcataggatgagatgagccagtttattgatctgtgtggtaccagttgatccatcgagtgcagggtctgcaaaacgtctcaagcactgatcttaggctttacaatggtgactttatgcccaggagcaatttggggagaagcagtatcttgtagtctctagctgcatgactactaaaccgtaatttctaatcttttggctattttgttagtcctacaaaggcagtctagtccccaggcaagaaggaggttggttttggggaagggttgtcattgcctttgttttaaaccataagctataaactaagttcctcccaaagttatttcagcttacccccaggaatgagcaaggacagcctggggcttagatgcaagagggagttggttacatcagatctctttcactatttcagttataattttgcaatggtggtttcaatacctgaatgcattttcgtaagacaaagcttcaatgccaaaacatctaagatatcccaatacggtattaattcatttgctcggtattaattcatttgctgttgctataaaacagaatacctgaaactaggttacttatttcaaaaaggaacttatttcttacagttatggaggctcagaatgtatctgcacaataggttcttctttcctgctgcccaggtagagctgatttatcaagacaagggaattgcaatggagagttttatacatgtacagccaccagctaagcagaagatcagagttttactattactcaaatcagtctcctcaagaagtctgaggctagggttttcaagatcggtttggggaaaggcatgtggaaagctacgcaataggtgcttgctgctgactggtagggattgcaatcataggactgtgggcaagggtcctcctgtgcactgagtctcttctgggcggggccacaggagcagttggcaggtgcaggtggagccatcagtcatcagacatgaaatatatctgaacagatatctcaaaaggccaatcttaagttctacaatagtgatgttgtctgcaagagtagttggggaagtcgcgtgtcttgtgacctctggaataatggctggcaatcctgtatgtctacaccgcagcagaatttagtttcccctatcctcctagcctggtggtctctcattagctctacaaacgcggttgagttttggggaagggctattgtcatttaaactataaatgtctcccaaagttagcttggcataagcccaggaataattaagagcagcttgaaggctaaaggcaagagaggagttggctagattagatccctttcacttccatcattttctcaccgttataatttttgcaaagaccatttcaagaagtcccaggtcaaaaggacacatctggtgagggccttcttgctggtgggaactctctacagggtcccaatggcctggggcatcacatggcaggagggctgtgtatgctaacttgctagctcaggtctctcttcttatcaagccaccagtgccattcccatgataatgcattaatccattaactcattaatccattagggcagaactttcatgatccaagtgcctcttaaaggcctcccctctcaatactgccacactgggggttaaattttggaggggataaatagtgaaaccatagcaaccactgaatcaaaggagttaaatgctatttttaaaaatgatgctaaaagacaaaaaaaaaaaatatagtgttaaaagaaaaacttgagccaaattaaagttaaaggagtttaattgagcaatgaacgatttgcgaatcaggcagccctcagaattacagcagattcagagagactccaggggtgccttgtggtcagaataaatttatagacaaaaaaaagtaaagtgacatgtagaaatcggaagtgagatgcagaaacagctggattggttacagctcgctgtttgccttatttgaacacagtttgaacaatcagcagtgtataactggctgaagaatggcggctgggattggccaagactgagtgattgtcacaggcccatactcctaagttagtttttcaatcttgtctacctattgagataggttgtagttcatccacagggactcaaatatagaagtacggagtccttctcaggccgtatttagtttgctttaacaatagactttatgggaaaatggtattttgttaaatgcaaaataataagttagagaaacactttagtgtttataatttttaatattgactgttagccttagctgtttatttatttatttatttatttatttatttatttatttatttgagacagagttttgctctcgttgtccaggatggagtgcggtgatgcgatctcggctcactgcaacctccgcctgccaggttcaagtgattctcctgcctcagcctctcgagtagctaggattacgggcacccgccaccaagcccggctaattttttgtgtttttagtagagacggggtttcaccacattggccaggctggtctcgaactcctgacctcaggtgacccacccacctcagcctcccaaagtgctgggattacaggcatgagccaccacgcccacctgccttagctgtttaatatgtaactcatggcttggtatagttcctgagatttggagaggcaaactgaggtttgaatcctgtcttcaaacttattggcagttgggcctgatcaagttgcttaacatttttgtgactcattctccttacatacaaagtggagaaattttgcctatttttaaatagaattgtacaggacagagaaaaatgtattttaagcctcttagtgctttgtgatatatagcaggcaatatttaaatggtaactattattattgataatagtaagtatgtatttatgtgcttcacagttttacaattaaacatgtccctctcagggtttcttactatattcttacctagagctgtgacatattaaaccaccttgcaccaaaactgaacaattggtatactgaggataaacattacttttttattcagtagatatcactggataattttgttataaatctctgacagtaaagtgaaagattatgtatatcagttaaaactgataaataacattaaaaagaaatttctgaattgaacatcttttgctctaaattttctggccaaatagggatacctcaaaggaaaatggccggtgaatttgtatacagataattaaatagtagttttagtcagtaaatcaggaggtccaaataataagtagaaccagggacatagcatgatggaaattatgctgcccagttttcaaaaacattgatggtaataaacagctgtgtaacataaaagctggtatgagaacttggtcaaattctttttacctgagttgagaaaaggtatcatctccccatattctactccaaactgatgaaatgctcaccgagctgctccgtagcctggctggttacctcactgaaatttcacccttggaggccttatgaccttttaacttattccacagctagattccaccattatccaaatcaatggtgcatttacaggtgattcagaagttatttagagaagattctgacatgttcaataaaaattccaaatttctcaggaattacttttagacatctctaaatgaataacagagaggttatgtgaaatccttgtgtaattatctgtgcccagatttttttgtcgttgtttgtttttggtttttgaaacagagtttcactcttatcgcccaggctggagtgcagtggtgcgatcgtggctcactgcaacctccatctcccaggttcaaatgattctcctacctcagcctcccgagtagctaggattacaggtgcctgcgaccacacctggctaatttttgtatttttagtagagaaggggtttcactatgctgaccaggctagtcttaaactcctgacctcaggtgatccgcctgccttggcctcccaaagtgctgggattacaggcgtgagccaccgcgctgggcctgtgaccagatttcttaaccatcacatgcctttggacttgccattcaatgttccatttagtagattttgatacattgaaaaatcactatgaacacattttcaagtctagctggcttcatttttgtcctctaaatggcactaaatagaatctgtgattgtgacagtgcctttgctttaatctaccagctatttttgaaagatatataacttaattgaaaaatagtacaatcttttcacttagaatctttacgaaaaatgtaaaagatgctttgccagtctgaatagttaattgagtttgactgtaccgggtaagatgcaaaagagtgtgtctatggcaactctttatctcataaaaaatttaaagggcctttatttaatgtgactccttttaaaattcatttaatggcgtaagtaaaactggatatataattagagtctaagataaaagcataataattgaaataagataatatgaagaagctcacacaacaatgattgggcttcaaatgaatatattctttaagctcagctgaactcttgtaagttgtattttttcactatgatgtaataataatggtatgtggatgacaattatactactttataaatgtaaggtgtcttatagtgtactaggatctttcctatgcattatcaaatctgaatctccaattagccctggatatttgtatatccttttttttttttttttttttaatcaggacagagtctcactctgttgcccaggctggagtgaagtggcgtgatctcagctcactgcaaccactgcctcccagatagctgggactacaggcatgtgccaccacacttggctaatttttgtatttttagtggaaacggggtttcaccatgttggccaggcttgttttgaactcctggcctcaagtcatctgccacctcggcctcccaaagtgctgggattacaggtgtgagccaccaagtccggcctgtatgtccattttttagaaaaggaaactgagcacaaagaggttgagtaacttgttcaagatcacataattagtaagtgataaagtcacactcaaacccaggtattctaacttcaagtataatgttcttttctctgtgttccttctttgtataatagagagcaatgagtatgtaggaagggcagaatagctgcacagatctttacaatatgtctcacaataatgctgtgctttcaaaagacttgatttaatcattttgtttcctcattcactggtctattcattcaggctaagggggcccttttttctagatagatttgctttcaccatttcattcccttgtcaatattcgccatcttagaataattgtgttttcattctcccgcttgaaaaaagatgcttaggtaattctttatttaagaagtaaagaaacattatcaatattgatatagatatgaacatatatatatatatatatatatatatatatatatatagagagagagagagagagagagagagagagagagatggatagatacagatatagatacctcaaatccaggaagaaggaactagattttttaattatacaaaaataaaatactcttttttaatttttttcttttaccttttgtgttctttacataagatcaaatgaataaatacatttatttaataaggaagcttattggtagttcctgtagtatttactgtctattaagcatcaacctaggaattgtaccataacttttgtttaaatacaattcttctattgatgcagtaagagctgtcagtcatagtgctgggaatgccagaggggaagtcatccctgacaacattttttattgcactattaatacgtacaagttgacgttcaagtgtgtgtatgtatgtgtgcgtgtacataggcacacagaaacatcatatatacatgtgactacgtaaaaaaatacacttaaacatatctgtttactctgtaagtgaataatcatttatttcaatgtttagatgagattttaacatattagaatggcttcatttttctttctaggcaatctgctagcaggctttttccagcaacctattcttcccccatctttttgatattataccaagatttctgcctccatttttgttgatgtaattatcccggcataattttgaaaaaagatttcctggcaatgtaaatccacaagattgttgatatggcttgagctcaaatgatgcttctatccgatttgtttacctttcagcttgagcagagttcttgtttcataagaaaaacaggaagagatactatagtagagaaggacttttatggatggttttattttaagtaaatattgcctgtaagggatccaggaattttagtgtttttcttggattccttaaccataatacttagcccagagcaaaactttctctcaaatgatggtaaaaaatctaattctattaaatcctgattattctgtgagctaccttggaatacattgcctatgagtttttctgctaagaaatggacttcgtttattgctcattttcccaaaatcaaggaatgctgttgttcttcaatttagatagatgttgacaaggtcctcttcatagcagcaggtgttaggctataattgctcattatagaattatgttttgcttgaaggaactcaggaaacaagaaaagcatgttttctgtgtatatgaattctggttgaaaaattgaaagaatgacactaggaatagtatgtaaattggcagaatttgtcatttcattgtgcaactagtattttaaaaggcaataaatcaacgtgaacatccttgggaaatcagtctccttcttaggcctaacttgcaaagtacccccttaccattgtatttttttaagatagaaattgagattagagcaacacggggagcaaaatattggcagatgaacttgttgaaggagatgaaaaacaagaagctatagaaatagattggccaatagtgctgagcaactactcaactgcaaaaatggcttgcttttccaagcaatgtgtaaagcaattagcaccaacgtttttattagtttacataaaataatattactttgtaaacacctataaacagagattacctagatagcctaagactattattaagtacaataaaacgttactggtttaaagtaataggtatagaactttgtattgtatggtgcacattcacataactagagaggaaatggaggtctacaagtcaaggttgaattacacacttgtaatccatccttaagggaaaaagcttcactgatcaagatggtactttgcacaaccttgccaattgtttcacaaagctgtaatgatgccacaaataatctttcacctcccatacctaagtaaaccatatttgagttattttctctgctccttcctatacctttcctctttggcatcacaaagtcagatttttaacctacaggttgacataagccaaaaatgttggaagattataaactgcctctctttctctcactgtatgtgttgtgtatatgtgtgtgtacacatatataagcacacacatagatagaactcacacggaaacataagcacatatctacgcactgttgttttgctaccatatccagtgataacgtttattttgaattacatgtattttttttctgaatttaagagtgaaatgaaatagagttttgttagatatacagttattacctatataaaaatgattctgtgcatacttccttggcaaagtacaatacctcctccgctgtcactgccaatgcacaggtgttctttctcctggctgttagactcactgggagaacttagaaaaatatttcagccacagctttactctagcctagatcaattaatcactaccttggccttacaatctactaggcagtccttcccaaactctagaatacagcagaatcccctagaatgcttattaaaaatgcagattctaaagccccattctaaatgatattcttctggtaggtctttacaagtcatgtattcctggggtctttctttgagaaacacaactctaaaaggtctttgttattcccattctgggttttgaattctttctcgaaattgtaacaaaatatatgtactgaaatactgttcctctaacaatctgaagaaattttcagcactagcagcacttgttggcactattgttgttattttgtttaatatttaagacaactaaaagttacagtaatttataatgagaatcagtattatggaatcaaccattaacagttcatctcactaaagaatttttatttttattatttatttatttacttacttatttttgagacagagtctggctctgtcgcccaggctggagtgcagtggtgtgatctcggctcactgcaacctccacctctcgggttcaagcgattctcttgcctcagcttcccaagtagctgggattacagctgcccgtcaccacacccggataatttttttttgtatttttagtagagatgggatttcaccatgttggccaggctagtctggaactcctgatctcaggtgatccacccgccttggcctcccaaagtgctgggattacaggcgtgagccaccgctcctggcctcgctaaagaattaacatcatatgttcactagtactgaggttagttcccaaacactgcactaaaaaaatgaatgaaacaaatgaatgaaaatgtgtttccttagccatattctaagaaaatcacctctttgattattgtaattggaaccatctcttctttctttgcctggaatctttgtaacaaggttatcttctttcatgtcccattccaattagtaatcatttatttctattaaggcttttataatcattcggagaatccacactctttgtgtctgcagtcgctgagttcactcattaaatacagaattttcaacaaccctatttccatcttcattgttattaatacttcaaatttgcttctgttcagaaccacgcacttgtaggatcgagtaggtatacgtgttatccgtacacactctgaaaaactccctgcagacacttactgaacaggaattgcttatttaactgtgttttctgtctctttcatacatgttctctctctactgaagtgattgaaggatgacaaaggtccttatgggtgtttgatggcctgtgaatagctgtcggtctacgaattccctgaaaataatttctccacttgtatgaaaataatttactccgtgacttttcatgttgtattgtcaatcttccttctggttgtatcaggcaggagtcattgttttacatttcattctttagggggcctatgcttggatttctcccattgagaaaaaacaaagcataactctgacataatcgttggtgttaatatcatgaaaacctggaaaaactaaaggcaaggcaaaaaatatgcattcttatgcatgctttatgtgcactatgcccgtacataaacctggcagaactttaggcagaattaaaggtttaaatgggcatcatctatcctctataggccttttagtgtgcttcttatgtcctgaggaccataagaagatctaggagctgagtcctacctaccccacattgctggtaccgttgggggctctatgccattctactccagccagcttcctaagattagtctattacttttgtttcctttttttcttttctttttccttccttccttcctttttttttttttttttgacagagtctcactgttttgtccaggctggagtgcagtggtgtgatctcgtctcactgcaacctctgcctcccaggttcaagcgattctcatgcctcaccctcctgagtagctgggattacaggcgcgcaccaccaggcctggctaatttttattttagtagagacgcggtttcatcacattggccaggttggttttgaactcctgacctcaagtgatctgcccgcctcggcctcccaaagtgctaggattataggcatgagccactgcacctggccttattactctcgtttcctagacattattccacccttcctaatacttagctacctacttttgcttccgtttaaccctctgtaacttgttttaaggtggttttttttttttttaaatcctttggctatgtatgttcttataaagcaaaatttagttgtgtcaattcatgaaatcatattagcattcacttagaggagagtgagaaatgtttcctgctcatctatatagcattgcccatttgcacttagttttgatatttgaggcaaatccttcggttttattgtctaaacacacagttgtaattctaaggaattttacaccaggtcgaaggaggtagcattgcccttgcatactattatgtagggcattgtaatatgacatctgtcatatagtgagatgaggatggctacctctttcacttaaaatagctctggccctttatataaccaaagaaaatataactgaaatgcttggcaagaagtaaagttatgaacaatgggcttccagcatttgctgtatgcctgctggcataggaattccaagcatataatgggtgttctttatataatgaaaagccaattgtgagaccggcttataatctttggtgccagtaggcagcatgtacatttcataatttcatcctaatgttttaagtgatacaaaaatgtcctttttatctactaaagtgcttcacatgttaataaatacatgtaaatttctgtaaagtgatattgtcccttaatgaatcaaactgataattgtttctatctcattaaaagtaatctatatttgaaagtgaagaactctacaaataaaaatatttaacatatcaaacatttgaaatttctaggtattgtaagcacaaatatttatggtcatatttggccagaatgttttccttgtaaatagacttggaatttttatatccactattgtgattggctgtaataatttttcaagtactgtatacacaaaattataattacattttatactaactatgggtgggggctgtcaagtgtaggtaaacaccaatttgcctcatcatctcttttgtaaaacctccaaccaccaaacctaatcgagcaagtttatgcctcctctactgcatgttagcactttttccatgttaatgtaatatttgtacacaaacctgtatcatccaacagagcttctgagaagtagagacctttgcttattagactttcagttcttacttcgtagaatggtggttggccattccatacattttattttattttattttattattatttttttctgagatgaagtctctctctgaccccgaggctgaagtgcagtggcgcgatcttggctcactgcaacctccgcctctgaagttcaagcaattctcccacctcagtctcccaagtagctgggactacaggcacttgccaccatgcccggctaatttttgtgtttttagtagagatggggttttgccatgttggccagactggtcttgaactcctgacttcaggtgatccacccacctcagcctcccaaagtgttgggattacaggcatgagccaccgcgtctggccatcaatgcattttaaataaatgaactaaataatgaatatcatttaagtgcaattctgtttacatttgtttacatctatacttattttaatcaagtatattcggtggtgtcaacaatctgtagcttaacaattttaattgaaagactctaattacatatcactatataatagttaaatagttttcttggatgaaacaaaagagagtgagatagagaaagaagtaacaattaaaggatttcattatgtgatagtcttcctgtgtttttttttccttttagaaagttgccgcaataatagaaaatgtttatttctttttcttactagtagaggtggcatttttgctatagagtgagtgcccttagttcttcatttattaacaaatatttcattctatgtataaaaagtataataaaatcatatagacaatgttacatgaaaaatgaacggattgttattacaccaggaaatcactactgtgccctatcaaaatgagtttgaagtatatatgtgcatatatatgtatatatgggcatgaatctaaggcaatcaattatgtctattttcaatgctctgtgaagaaagaaattggttgcctactgtcacattttatcttagtgatactctttcattaaaatgcacacacgaaaaaattaaaaatgtaaaatctgattttctaagtggacttaggaaggtacagggaacaagtgctagtgcgtgaagtggaaagtatgagagtacatgaagttgaaaatgtgtttgtgtgtgtgtgtattgtagcaggtcatctaggactgcaattttcaaccatatgcccaagccccggcatagagatagtgattcagttggtctggggtggggtatgggcttaggtaatattttatggctctctaggtggttctgatgtgtagtaggggcaaagaactgcctctatgggtgtctaggactgtactgtaactatcagcaattagtgagagggttctttgtaatgcctttgattattcttctagagacatatgttctgtacatcagccggggagcaaaaccagggaattccagaagtggttctcccttaagacttactctgacggtgttagtgttttcataactcgagccttaccctcattctaggaaaaattataattattatctatcttactttccaccctcagtacttaacattttaagggatttagtgaatttttccacttccctttttatatttgttgcaggtaagtcctgttgaatatcatcctcaaatacatgcatattttactgccatggtaacattttctactttttcttctatttttttcatatgtaaattatcattgaaaatttggcagagtctctggtaaccaaagtaatcttgtctgtttctgtgctactagttttattataatttgattcctgttccaaaaatgaagtacagtaataataattttttaaaactcaaattatttgtaggtcaatattaatgactttttattaatgtatatgtatataggtttaacaataagtgaagcagcttataacagtatatattctattaagtagaaatttacacataaagttagaagaactccatgtgcagtgtcctcttatgctcatatataactttctgtttcaaataagagtttcaaaactagagtctgtgtggcacagatggtgaattgatgccataatttccaatctgcttgttagtagagatatgtcatatgtttattgatgattgcaagtatgtttggtgcattaaagcttcatatttagtattataaaaaacttaatgtcatgtggggaaagaagttgctacctttctaaaaattgtagaatagccaggctcaatggcgcacgcctgttatcccagcactttgggaggccgaggcgggtggatcaccggaggccaggagttcaagaccagcctggccaacgtggtgaaaccccatctctactaaaaatacaaaaaccagccaggcgtagtggcgcacgcctgtgatcccagctactcgggaggctgaggcaggagaattgcttgaactcgggaggtggaggttgcagtgagccaagatcacaccactgcactccagcctgggcaacagaacgagactccatctttcaaaaataaatagataaataaataaaaacaaaaattgtagaataaactccttgaattccaggaagaaacaaatattgttgtccagttatgcaattatgcataatgagagttaaatgcacaaagtgatcttaaatgtacatattcaaaaatagaggttggatcaagaattcagattattcaatatcaattcaattccttctgttgtgccatttgaatcctattgccaaagatgattattcatcttgaaaaacagactcccaaattcagagttcctgcattttaatttgcccttatgaaaggaaggattctttccttttctggaatacaatcaacttctgctgagaagaaggaaagtctttattcaatactgaaaatgtgtattttcttaccgtctatttatatggacaataatcaaacttttaattatcttctcacaatacttacagatctatgagaagagttgctatctaaagctggatctttatggagaagagacatgctcaagtgtagcgaataatttttgttacatatcagtattaactaagctttgcaaagtgaatagggaaacttatatttaaaatgtcagggaaaaaaagagttttaagtaaaagggacacctggaactctaaagagactatagctctaaacctgtagctgaattctgccttagatttcgttgacccttaactaggggcaaatgcacaccccattctcagggtttcccacacacctctggaaggaacacaggagcgtatttacagctatcgtctaaccattatagaattcctggggacaaagttgtgtcagccacctttgatttgtagtaaacaggtacaaaaccgcatcatggaattatttctgcttatataatcctcttctgcagtgtctgaatcttggcacctcctctccttcctcctaaccactgcaaaaacaacacccagattaaggcatcggggagaactgaatatctgaatatcaagtactccatatatattgatccatcgaatatgcctacaatatcactactaacctacaagtgtaccaggagttacacctgcagtataacagattaaaacagccttctccaaagctcatcactttgaatgttaaaagattcattttccaccacttaaaatctgcatactatgatctgtgtataaaaagctaaaagatatatccaatttcaaatgtaatgtcatgcaagtgtctactgaatgtgtatatatctttgtaagtgtccctgagcaaaataactttcaacttaacattctttttctcttggatataaaagagaataacgtaacaagagcaaatttgcttttaaatttctgccttgatagcaagttaaagtatttagaaccaacatcctcttaaatgtataatttatataacggatgagtctagaacagcatttccaaatggaaattgtaaagaacattgatcccgtaagatgttgaatgaaaaacaaattgttaaaatgtgataatttcatttccttctttagcgagtcacaactcaaccctgaaatgttttgtagttaaaaaaattgtttaacttagtttaacccaatgtttctgaacctacgtcacaaaggaaatgtttttgtcaagtgatacataactttcaaagagattggatttttttttttttttttttgaaatgaagtttcactcttattgcccaggctggaatgcagtggcatgatcttggctcactgcaacctctgcctcccaggttcaagcgattctcctgcttcagcctcccggttagctgggattacaagtgcatgccaccacgcccggctaattttttttgtatttttagtagagaaaggggtttcactatgttggtcaggctggtctcgaactctagacctcaggtgatccacctgcctctgcctcctaaagtgcagcgattacaggcgtgagccaccacgcctggtcgagactggaattttttgaaacacattttcataaatgaattactggggtactctctgtttattaactatgttagtactgacaaagattatttgctcggccaaaatttattcaggcttcccaaccttctcatagcccagtctgtgcacattctcctaaaatttagttttagcaggccagatcagtttagccagaaaacactcatccttggtatttgattatcctggatatctgatcatgttcctcatcatccaccatcctccaggggatgactggactattttcagcaggagtctcccttacccatgatgcttcctcttaataattttccatccactgacccctaccctgttccttggttataaaattcccatttgcctgtgctgtattcaaattgagctcaatctctctcccctactgcaagaccctattttcacggtccctatacctattgagatggtcttgaataaagcctgccttaccgtgattcagcaagtgacattgaataattttttctttaacagtataaggatcgcacattaccatttgttttgaaagatggtataaaaagactaactgaaaactaatcttggctgggtatcactggcagaaattcttggtcttcaatctatgtagaacagatatttgcattttcttttgaaaatttaatacattgattaaattgtcattttgttataaaaatatgaaatgaagggtacatatgatttttaaaaatttctgtccaccatcaccaaccactatgtgaaaatacacctttgtaagactttttctattctataacataccttcaaaaccaagaagaagtatttgtaggaaattcattgcttttatttgtgaattgataaagggaaaataataagctagggctcgagcttcagaacagggtgatggttttatatctctctcaaaagtactgcaaggtaggttgtttcaatactattaacaaccccagggttccctgacatcttctattcccagcttccattctcaaaaattatatcgaggccatgagttggactcctcagccctagcaaaagattattcatttgctctgtaacccttcttgaaccccttttcctggtagctgtgcccaataaatccgacttatatatctttgggagttggagagagagagagagagagagaaagaaagtgagacagagagagatagagggaaattattttagctaagaaaatttacagtcacaataatatgagagtctctgaataagggataaaagaatattagacgagacatagtctctgccaatggtgattaagtaaacatagtcaaggagaatatggctgtgaccattagtgtgtaagtggttacatctggtgggcaatctccagtcataagtaaaataatctacgagtgagatacaggctaagcaaagatttcataattaggaccgaacaagcactaagtacaaagtcaaacactgataaattgagcttcattaaaactaagaattctatctattataatacactaataacagtgaaaagaaaagtcatggactgggagaaaaatattcacaagacgtatatctgattagaaaacttgtatccataatatataataaactcatacatatcaataaaaagacaacccattttttaaaagttggcaaaatatttgaacaggcacttcataaaagaggacaaagatggtaaaaaacatttgaataggtgcctaacttcattagtaatcaaagaattttgaatacccctatatatgcatccgaatggttaaaatataataagacaatatcaagtattggggagaattggtgcctcagctggagctctcaaatattgctggtttaagtgtaaattaatatttgccaatatctactaaatctaaatttatgccttccttatgagccagcaattcctctcatatgtatgtgttcaaaagaaattagtaggccaggtgtagtggatcatgcctgtaatcccagcactttgggaggccaaagtgggagggtcacttgaagccaggagttttagactatcctgggcaacatagtttgacctcatctctacaaaaaaaaaaaataaaataataataatcaaaattagcctgacatggtggcatgcacctgtagtcccagctactccagaggctgagatgagagaatggcttgagcccaggaagttgaggctgcagggagccgtgattgcaccactacactcctgcctgggacagagtcagaccctgtctcaaaaaaggggagaaattaagtccaccaaaatagcatgcacaaggtagttaatagcaacattttgcataatagcagaacctgatataacttgtgtccctcagaattagaattaaaaatgcggtatagactgggcgaggtggctcacgcctgtaatcctagcactttgggaggcccaggagggcggatcacttgagatcaggagtcagagaccagcctggtcaacatagtgaaaccctgtctctactaaaaatacaaaaaattagccgtgtgtggtggcaggcgcctgtaatcccagctactcaggaggctaaggcaggagaatcgcttgaacccaggaggcagaggttgtagtgagctgagatcatgccactgcacttcagcctgggtgacagagcgagactttgtctcaaaaacaaaaacaaaaaacaaacaaaaaacaaaaattgggtatatccgtggaatattatatagtaataaaaacctgctacttggaagaatatgaacgaacttcataaacacaatgttgactagaagatgaacatttactgtgtgattccatctatatgaagtttgagaactggccaaagttatctataatgattcaggtcagcagagcagtttcttcctgagaggctggtgggaatatagtgtgaattgggaaagagcatgaaggagacttacagggtgctgcaattgttcagaactctttttccttgatacttgcttacagaaatgtgcagaatttttatttcacctagttttctatgcatgcgtagaatctccatagaacacacattttattaagtacgcattcaacttcttctaaaatacctctagtcatagaaaatgtaactttatttctttattccttactttgcctagcccaagctcctacaaaaaaaaagattagttaccatttaattcaaattataaaacagaaccagtcttttaaacagtatcggatacacaagtatctaatctaacttccattgcctatcagtggatgtggctttaatcaagtcttttctaaacaagatggacaggcactgaagaaaaaaaaagtgagccattttatgtgttttaaaatgataatgtgattttgaattttgctattgtagaagctcctaacaatattatctggcatttgttctatctgaataaagccatggcttatattatgtatatatggaatttcccagaatactattgttagacacatcactgagctgtgaaaaaaaaaatcatctctaatttgatcaatatgtacttacacgtatatcattagttgccattgctctcagcctttagtacattttttatgagccccgtgggccatgagcttgctttttcataacagagaacgagaaagaagaaatctcatcagtataataatacccacatcagtagagggcatggttcagaggcaatcttgttgtctgtcacagactccatgatataagctagaaatgataaagagattcgttacaggatactgtaaaagggatattatggtatataaactcattaagtgttaactagatcaaagcaaatatggcagaaaagagtctctgaatactgtagcagagtttattgaatgaatgaacgaacgaatgaatgaatgaatttataaaaagcgcaggggggccggggcgcggtggctcacacctgtaatcccagcactttgggaggctgaggcagacggatcatctgaggtcaggagttagagaccagcctggcaaacatggtaaaaccccgtctctactaaaaatacaaaaaattagccgggcatggtggcgcatgcctgtagtcccagctacttgggaggctgaggcaggagaatcgcttgaaccctggagacagtggttgcagtgagccgagatcgtgccactacactccagcctgggcaaagagagcaaaactccgtctcgaaaagaaaagaaaaaagaaaagaaaaagaaaaaaaaaagagcgcaggggtcagataattgagttagaaggtagaggagtggggatgttaatgcccatgtgagaaaagaggaagaggtattgaaggaatccagcggactttgatgaggaccatgcgggactttctattttcaggaacctaagggaacatcttgctgtaggcagcctggggctgtctccatcaaagaaatgctaatatttacattcattggtttttgttatgtgactgtctatgtgctaaagctgtggttctcaaagtatgtttcagacccgcaatatcacctggaaatttgtaagaaatgtaaattctcgggctgtgcggagacctactagataatgaattctgggagaggtattataagaagttcttcaggggattttgatatagtctctaggttgagagacagtgtagtagacaatacattcattactttatttattcttctccatgattctataaaagagctattgttactgctttgtttacaaatgagaaaactgaggctttgaaagaggctcagtattttgttcaaggtcatatagctggtatccagagatactgggaatagaacccaaatttgtcagactataaaacacggtgctttcagccactcctccagagccagggggataaaaattcattaatttccatgagtatttgtaatagtagcccgcaagtcctggaatacaattataactgctacagcattacctttgaggagaaaatatctcatttccccaattgattgccaaaataaaatgcttaaaatacaaatgtctggttgaagaaaccctttaattttttttcttgcgttcaggcatttgtgtcaggtttaactaatttattttaacttgcaatacagtgttgcctgtagtaacaaataggacattctgctattagtttttaatctcctaccgacttgttattttccactcctgaagctaaacttctttaacaatttctatgctcattgtatctacttccttactcacgtagctacctcaaacaccaataatccggctgcttccacatccttcaactgaaattgattttgtcacggcccaagtcacatcaggcctcatcttaccactctgtagtattgattgttgatcggtccttcctattggaaaaactcttcttccctggcttctaagatattccactattctagttttcctgtctcagggcaactttatcattttcttggagggttgctctcctatcgtaaatctcttttaacgttgagcttcaatcttaatgctcaatcaacatatttttcttgatctcatcaaaatccatagcaataacaactcttaaccatgaccctcagatttttatatccaaccaaaatcattcttttgagctagagacctatccccctgcccatcagttatgctcatgtatgtcacatagttaattcaaaatcagtatatatgagatcaaaaactgccttctaagcaattcttcctccttctctagctcattgaaagacatcatgtgccaaacttctcaggtttgggggtatcattcttgcattctccctcgagatcactgttctaacattaccttggcatcagccatcatgttttgccaggattgttgcagttcccctaaaacagatgttcaatttcccccacccctgtgattcagttttccacatgcagccagaatgttttaaaaagcatattcgattgtgtcatcttccccctagaaaaccttctgcggtttcttcaaaataaatttaactgaataactagttgacttaattcaatgttttccttcgtcacactaattaatcagtattttcatggtcctcgatgctgagggcttaacattcaagaataaatttgtcttatgtttactttaacttataaacttcctttaaatgaaaactaattgttaaatgatttgcaaaataaccagaggcacaaagtctattgtgatcagtggatatgacagaatatattttttgttgttataccatcactttcacaaaactatggaatatatatataggcatataggtgtgtatgtatatatatgtatagatatgtgtatagagacataatttatagaaacattcgtaataaacccctgccaaacatattttgcacgtttgaaatattagttgattggatttgtggtttgtatgtaagttgaacaattaactgatgtgatcattctgtttccatggctgttaccttagtttataccaccttttcacctgagtgattacaatagcctcctgattccttgtctctttatttgccacgttcccttcttcaaacttcccaaatccactttcccaattgttatcaaaaagagttttcctaaaatgtaagtcagataatgctactcattatgccaaattctcattgccccaaaagtgaaatctgaattctataagatgctctaccaatctctccattaattggcctctgcactatctctttacattcaccccttcccacccaccgaacccacccatccctcaagaacgacattgtacgtactaatcatgtcatacaagtcactattctagcttctgttattcttctggaaatgtcatctcccacctcaactttttacccagctaactccagtttatcatttaggtgatgtctcctttttggaacatacctagaattgacgttacaggaggaatatctcttgtgtgtcatctcaacatcccacagtaactatttttttttctttttgttttctttctttcttttctttttttgagatggagtcttgctctgtcacccaggctggagtgcagtggtgtgatctcggctcactgcaacctccgcctcccgagttcaagcgattcttctgtctcagcctcccgagtagctgggactacaggtgcgtgccaccatgcccggctaatttttgtatttttttagtagagacggagtttcaccatattggccaggctggtctcgaactcctgacctcgtgatccgcccgcctcagcctcccaaagttatgggattacaggcatgagccaccgcgcccggcccacagtaactatgttttaacatacatcaaaccactttgcaatttcctgtttacatgtcattatccctcattagtaagcttctaaaaagtatgggcatttatccagttccctatcatctccctagtccccagcacaatgcctgacacttaagtaattacgtgagtaattaaatgagtaattatgacacattcaagcttgttaaactctaaaacttggaaataaggcaaaagaacaagtagatgttcttttattatcatactaaaaagtattgtctaaaagatctaccgacagatagtttaatttgttagggacatgcgtctttgtataacttagtactaacttaaaagataatttttttgtgggtacatagtaggtgcatataatttggaagcacatgagatattttgatacagacatacaatgcatagttatcacatcagaataaatggggcatctattaccttaagcatttatcctttgtgttacaaacaatccagttatactcttagttatttaaaaatgtacaagtaagttattattgactatagtcaccctatagtatttactattgattagggcttagattctgagaaattttacataaatgtacacatttttgttcagtagagagacaagtaatatctttctggcaccctcaaaatatataattttattgcactttttgatgttaatctgttttgtttctaacttagcaatcttgttctagcttctttttctttctgtgactatgtgtgttcagtcccttgaattcccctttgaatcagttttaatttgttgcctgttttgttattagttagttgaataaatgtttccatattatcaggatatgtttataagggaacagcaaatttacttccgtgtgttttaaactatatgagaaacactgagcttggcatcaatagctaattctaggggagaaaaaaagtcattctcgtatatatttggaaaaacagtttttattcctttttgagatattaacagccatttgtatgttgaagattctgagaaacttggaggtgatttaatctgttttgctttgtttaatctaaaatttcaagattattttggttctaggaaattttgctctagaaaaaacagtttggaaacattggtttacttatagctttaaagaacaatattttaaactacaattcttgtgttcgaaatgctgtaaaaatcatttctattaagatttatttcctctaagtgttttgcattcaaataaggtgaaattctgggtctccaaatatacatttcagaaaagtctttgtttagctgtagggaaggcatcctgacttctcatcattatagtcacatagatacactagatttaaaggatatttaggtcgggcgcggtgactcacacttgtaatcccagcactttgggaggccgaggcgggcagatcacctgaggtcaggagttcgagactggcctggccaacatggtaaaaccccgtctctactaaaaatacaaaaattagctgggcgtggtggcacttgcctgtagtcccaacttcttgggaggctgaggcaggagagttgcttgaacccaggaagcggaggttgcagtgagttgagatcgtgccactgaacttccagcctggggaacagagccggtctccgtctcaaaaaaaaaaaaaaaaaaatagagcgtaattatatattttccttattttaaaagggaaaaaatactttccttattttccatatagagtatatcaaaataattacaatcattaagtaaaactaacatttacctgtggtctaaaaaagtcggttgaggccaggcgcaggggctcactcctgtaatcccagcacttcgggagttagaggccagtggatcacttgaagacaggagtttgagaccagcctagccaacgtgatgaaaccccttctctactaaaaatacaacaattagccaggcgtggtggtgggtgcctctaatcccagctacttaggaggctgaggcagaagaatcgcttggacccaggaggaggaggttgcagtgagccgagattgaaacactgcactccagcctgggcgatagagggagattcagtctcaaaaaaaaaaaaaaaaagaaaagtcagttgagatagtgaagatccaaagatatctgctaaaaaagtgtgtgttatctagttttaaaaagaaatgatatgcaaataaaaacattagtgagcagttaaatatttaaagggtacgttacttacattatgggtgtaaagtgtaagtggatttctgaaaacatgagcaccatgtgaacttcagtatttaaacaagtttattgcttttggcttttggatttattgtttttttgaaaatgggtctgagaacggcctagaagaatgggtagacttgacatctaagtctatctcaattctgctcttgagaaaagaggaagaaattgctcagaatgttctatcataattttcttcttgctctttagatttctaaatggctacacaggtattgagaaacacatttttatcttgttatgaacactaaaattcattagccttatatttcctctttccttatagctgtgtcttgtttttgatggcttaacacttttccattctaatcaagctttgtcatgggctatgggctgaagtgccttgtgatggactgatttactttcagtccctgtaatctgtgcccttgaaggctagaggttgaaatcattaaggctctgctgttgcccttgatctctgctcaaagaggctagagattgattggttgacagtggttgacctggacgtctcaaaatgaagccgtgatgaaggaaaatcaagtacacacgttcagaatatttcataatgacatttattctgcgtgcattttttccagcggtatttttgcttctttttttaaaaaaaatctagtttaatcatttctagcccaccctcaccactaccacatgtttattccatttctacattctggggcacttaagaccttttaattccttgaattagtcatttataaatgttgtctgaatattctatcaaagcaaggcagcatagagaacttattattacacacttatcacatgaaaaaattatttattagcaaatatctattcagagcaaacattttgatcaaagttggcctcaattcactaattagttattatgcaaacataacaaacatccaatagaataaatattcactcttttctacagttttttttggaatggtttcagtgctggaaaaaaaaactaaaccaattcatgtaagaaaaagtaaatgtctgttaagagaaaagaccacttttaaatacacgttttaatatttctattttaatttctacttaaaaaggttaaggaggaatattctaaagacgaatatatttgcaaatactgtgggaacactttattgaaccaatttgagaactaagtcaattatattgaatttacatatttggttaaagaaaaaatgagaagtgattagattagttcaatatttaagtgaacttaacagaagtatccaagttcatgttgaccctattgcttcgtattaatattgataattacaaatatacatatatattaattttcaaaaatatagattatgagtgggtaataatagcttctaaaaattcactttggtactattccatagtggccaagtttccttttgttctctggagggaggtggcctaatttaggcaagtttagtatttagagcaaaaaaaaaggcagtctatgcagagattcaatggcatcttaaacctgccccacctatctctcattttttacattgctttttcattatcttttcctttcctttcgagagacttgaatttaatattgtctctcttttccccatgtttgccttttataaatctaagcatttctgccattaatactgtaggttaagaaagtggcagccaccatatttaaggaatagtaaaatctgtaactggggaaatatacagtcttctgagaaactgaaataaatttcaggtaaaaagtatgtgacgtcaattgagtggtgcacgtcgagggatacaaacctaaatacattccaggatgaaaatcgtgataagtttggagctccattttcagggaagtttctgtactgactttagaaacattgcaaccaaacaaatccttgggaactgtagaaaggactctttttagtgttcaggctaagtagacaatgcctacatatttaaagtttcatttggcagacttgacacagtaggcttcatggaacacaagttatgccttccttggtctgagagagagaagactagttctgctcaactgaagttaagatctgaggttcagtgagtccatatagatatcatggaagattgagtgaatacactggccctaaagcaacagaaagagcacaagttgagatacagttttaatccccaatgattggaatcaccactgccagatatcacatcctaattacacattctgcccttcaagctctggcaatacttttcttgcggtgccccctttctttagtttgccatatgaagagtgtggtaattactttccctgcagttgtttaccagttctcattcatttttcaagttttcctttctctctctctccttttttttttttttttttttttttagatggggagtctcgctctgtcagccaggctggagtgcagtagcatgatctcggctcactgcaacctccacctcccgggttcaagcgattctcctgccctcagcctcccgaatagctaggactacaggtgcatgccaccatgcccagctaatttttcttgtatttttagtagagacgggatttcaccatgttgggcacgctggtcttgaactcctgacctcaggtgatccacccgcctcggcctcccaaagtgctgggattacaagtgtgagccaccgctcccagtcgaatttttctttctctaaacaattttcagtgtaaaggtctgctgtgctataaatttgtgacacatgattgtgttgtagttacgactacgtaaggctctatggacaggtttcctttagttctgccagcacagctaaccagctaatataaatataaagaaatgcaactgttgacaccaaatgcagtttccgtttgcctgaacaatcaacaaataaacacaaaatctgaataaacattacaatgtgaatctatgtgtctgtatccataattatataaaattgaattattctaaagaattctatgtttcttaacaaaaatattatatgcatatatacagttaggtttaatagatttgtataagcatttctaattcttagcttccattgatcttcagtgtttcagaatatttatttcaaatcacttttggaagaaagtaagtttacaaattgtgaaaataatacacaaatcagagatccctatttaaaactaatccctacatcgcttcatcaaaatgcctaaaattcttttttggaatgaaattcacagagaattgcaagattcatttcctttacacttttattcactgccaataacttggggatactaagagtgcaggagaagcaggtaattctgagggcgttttggaggaaagcagttttgcattggctaagtttttaaaaaagattaaacatttaagtgccttgttttaaagatttgaatgataatgatttcaggtaattgatttttaagctatatggtaataataagacaaaaataattcatttgtttccttttggaaaatagattttttaaaagataaagatctgttttaatttttgtttttatttctaaggtactgtccaacctaaaaatatgaaagtaggtgtgcataagcttttttaaaaaaaaatcgccagtagtacaaacaaattttatagtccatcatttgcagggctggagggcttgccatatttaaatgtgtgacctgttttgagtatttgggtcaaagagaagggaggcaccagtgtttaaagtggcacaaacagagggaagaatgaaaatacaatcgaatatattcatttttattttcataaataaaagaaagtttaaaaaatctaggtacatcagtaatgttcccttagatagtattattatgtggctattgtttactctcctttgtcagcaacacgatcagtgattttcagcacctgctattgggttaataatggagttagagaagcatgagtttcaatttgtgctcatctactgcaaagtagctatatgaacttgggcagttacttaacctcgctaagctttgtttcctatccatacaatagggtcaagagaagtacctctcttacaaggtctgtgaaaatgaagtatgttcatgtgtttaaagtgtttagtaggtggcacatagtaagcactcaaattatatggactatggccattaccttgacaaactatattctctctccatttcctcatatgtaatgtggattaacacgaagattaaacttaaaaagtgcataaaaatctcagtgtctagcaatttgtagatgttcaacattattaaaattccctcctcaattttgcttactttgctgtactgaatgctatgtgagataggaaaggatatcaattatttgctatgccccttccgggcactaaataaatacatgtttttgttcattcttttactcaatctaaaagttattgagcaccaaataggcatcaggaagtatatggacaagtataggaaacaggattgatatttacaatcaggagaacaattttgagcccccagtcagtcacttgatgttatcctgggcaatcaatggatagagtccaaccactctaagcctcagttttcttatttctacatgttgatagtattaatagttgttataagatttgaaacctgttatggactatagtattttgtgcagacattagtcaaaatcataaattattttggggagcacatttacattcctcacagtgaagccttgggccctacacctttgcactaaattatacatctgtagcaggaaaaaaaaatttcagtatcacacaaatttaagtgggctaaaaatggtattttattaatttttctatagctaaattaaatttctattttggttcctcttttaatttaacaggtttcttaatataccattctcaggaaatcttaataaaattcagtgacttttcaggtctaccggtcacattcaggagttgttaggactctagcctccactctaggattggaataacacaggagtattacttagcttcatggcatcagggccaacttctgattctaggtcaaggacacacagagatgtgacatccaatgtggtctgtggggaagaagatctttgcatgcaggcattggctgaagtgaaccagtacctgcatcccgcccttagttgaactgcctattctgcctccaggatttggggtgtctgtgtcctgattaccacacccttgaaagactgccagcttgctcctcctaacttccatgaccttctcaagcaccgacacatgttagctgcttatcacaaacctgatgagatgctcagacccctgtgaggctaatctacatgcccagtccctttgctctggttgggcactatttttcagcagctccagaacctccttctcttctttaggactttggttccctaagaggacattataatgttcctcttatttgaaaaggtgtgtgtgtgtgtgtcagagggtcaggaccctccccacacccccacacggcttctagctctcacttatctgtaactctctcaacttccccctcttcttctcttggtaggcacctagagcaggtaaaaacttttaaacaggattcttctatatctgtttatgccagaatcatggttcacttacactaaaagcagttgacctctgtcagtgaaatcaagagttgattttgtaattcaagagctctgtatttataaacaaccctaaggcagtgaggaaacagtgcctaacttaccttacttgcaaaggatggaacttaagaatgtggttacaatctcacgaaatacttgtgtgtgtgtgtgtgtgtgtgtgtacgcacctgtgtgtgtgtagttctgaagatggcattgttaggtggtggaggcctataatattatgattctcaacatgtgaattgttatcacaggcaactaatcctattgcctcaggtttacaatctgtaaatgggaaataaaatgcctaatgtttgttctcagcctagttgtgaggattaaatgcaaaatacagcctcaacaaatgtgagttcccttcctcacattcccttgtaaaaaaaggactttccccaccccccttttatttagcatatcaacaattactcctttatttgggactgaacagccttttactaactatccttttgtttctcattttttatattcatgcatagtacaacttatgaaatattttaccccaaatcctcttgggtctgctttatatgcataaccaaataaggcatatttttatacaactattgtgttttatcttaaggtaaatttcaagctaaagtgaaaaatgaattccttctggtattcaggcagaattttccttacgagaagtaggtcaagaaacattgaacgcagaataaatttatctctgaatacggctcttcagctctggattgtttaaggatggcctagaatctacgctgagcattctcttgcatctcctttttcagtatggttctgaattagcactcgggcataaagcatttccttggaattgctcttatttttgtccccatattctgcactccatcgtcaggtaagaaggcaatatgtagcagtcatttaagaaaccagcacataaattatttccgaagttaaatcaatgtgcatcttactggttcagttcacagttaactagaactgctggggcttgcttttatgaattgtcccattccctccttgctttctttttgagactgactcttgctctgtcacccaggctggagtacagtggtgcgatctcagctcactgcaacctcctcctcccgggttcaagtgattctcctgcctaagcctccctagtagctgggattacaggcatgcaccaccacgcccggctaatttttgtatttttagtagagacggggtttcaccacgttggccaggctggtcttgaactcctgacctcaagtgatccacctgcctcggcttcccaaagtactgggattacaggcatgagccactgcgcctgggctctctcttttaaacaatcataaatatgaaattaaatgggctgactggaagcaaattggtctgtaggaacgcccatgaaagtgttccattctgattgttttcccatcctgcagcccctctggcctagtggaagctcctttcgttttgcagatttagattaactggggtaggtgagagagggcagggatggcaggccatttgtctctcatcaccgactgaaaagttgagcctaatatataccttttgctcctctacccaaatgaattacaaaattctaattccctcacacaccggggcctgttgtggggtggggggaggggggagggatagcattaggagatatacctaatgttaaatgacgagttaatgggtgcagcacaccaacatggcacatgtatacatatgtaataaacctgcacgttgtgcacatgtaccctaaaacctaaagtataataataaaaaaaagagttgattgtttttataatctaaaagtaaagacagtttggttttgtcaaaacttctttgttttctatttattttctctatagcttctaaatttgtgttctgcttgtgcatgcgtgtatgcttgcatgcatatgtgtgtgtgttttccttaaagagtaggcaaaaaagggcagaaaatagatcattcccttataaacctgacaagtacctgtttgtttctttcactgtggtaactggaaggctggaaatactgagcacttcagtagtcattctaaaaagattggttcatgtttaatttgtttgactgcccaaacctctaatggttcagtgaaaccttcgtgaggattttaagaaatagatcaggtgatagtttcagttgaagctactaaaaaaagcctttttgttcatattattttattagagtgggaaattgggaattctaaaatgttcccacatttgtcacccgtgttactctggcagccttttgtcatgttcacattttccctgttcgtttgttactgctgctgaatgtactttaatgattctaataggagctatagattgtgcagaagaataacaagcttcaaattaaaaaagaatatatttgcattttgtggcttctaaatattaatacaattgaattgtttttgttgaccactgtacattgacttcccagggtccggtgcatagcaaattcatagatgctccataaaataattatagaaccatgcattcgtgtgtgctgtgttgtggttctgggtactaaggatgtctgcctgagtcctgaatgagtcttaatctccatccaagttgtgtgtttcagagttgggatggtgcaaggaatttgattattaatgtaaactttagataactcatagcatgaataacaactgtacagtagaagaaaaatgcagaaagaataaaaaacacaaacaacagctaaaacaacaacacataaaaaacctcaaataattagagcaacaggctgtgaatgcatttagcaaacatatacccttcacttacttttgggaatccagtaactttctcctctgagttcaatgaaaaatcagtagcacttacgggtgtgatcattaactttgtttacttttttagctttcaatgacattcacgtttgtgttgagatttgttttttctttcctgaacattttatcccattcgccaatccagaaatgatagaataggaaaagaacaactagggctttatgcaagtacagtaaaatctattgatgcccctctacaaaaggctgcaaattggaatggctgaaatcatctgctcgtcttttgtgttgcattttaggactatcaatgaaacttgaaatgatatattaatagaaagtttgaacaggaattatatattgaaaatgtgacagaatgggtagatccaatcatcctaggctgttgagaagggaatatgcctcacagtcttgtactttttagatgaagccttccaatttacctggcagcccacctcatggctcagtgtttagtcatatagcagaggttgttacaattacaaaagttctcttttttttccatggaaaattgatcatttggagcagtagattaatttatttcaattttaaagtatgagaggcatagaggtacattaaaaagaacaaagactttgtagtcagagacatctaagagttgtgtaaacctgagcacataagtagcattttcttatctatatgatgggatggggttggggtaagaatatatatcatataggcagttacaaatataaaccacacatcacgtatggattttttttttagatgaactcatttatttgacatattaaattagacaaagaaatatatatgtaaccagataaaaacaatcacattctcatactacttgaacacaccgcagtggtcaaaaataatggattgtaaaatggaccccaggatttaatgcaaaaaccaccccatacgagaaaagtttcaggcttctaacttcactgaatccagtactaaacgtgcttctttatattcctcagcttcttccaagtctttttcactttctaatatctgttgaagatccaaatatgcggcttccaacctgcgctggcaatctgggatcatcatccgggattcttgtaggatctctgcctgctttttgatgtcataattttcaccatcttcagctctcattttttcaatcttttcttcttgttgttttgcctctttttcatacatcactttttatttgaccaaccgcttcaccacaccggtcttgatcttgatctgtctcacgcgaggatcggccatggtccctcgagccccgcgagaaggaggggcggaaagccggggtaaccgtggagggcgacgcgcagaggcggtagctatttaggcttggtcgccggcgcgcatgcgcaggctgcgcggccacttaaggagtttttataataaatcattatagtgtcataccttccatcaaaggattgagtactcaggtgtgaacattggtaaacaatttttccaatattaacatctgtagtattttaaattatgtgtcattttaaggtactgttattctctttgtaatttaacattttttataatagaaataattttgcaattgctacattaacattttgagttgattattgcttattgttagcaattccattgcatcattttacagattccatcactgtgctgaaacatcccatctgtttgtgaaagttttggatgttttctttagtatctagatgaatctattccttatcttatcagtcagagatattttaaagtccttgtctgttagttcaagcatataggttatctcttagtctggttatgttgatggctttacttcttgataatgggtgtattttgcttagttttatttattttttgcaagtctcattttctttttagtgaatgttagatgtcatgtatagaagaaaaatagagaatgaggtaaatatgtttaatcttggaaataggtatagctttttttctgtcatactgctagtatggggtttgagtcagtggtgttagtattgagctggtttggaggggcgggggttgttgttgctgtagcaaccttcagaacactacagtcttcaaagacctccactgatgggctgctgctatcccgtgcttaatgtaatagtgtctgcggtcctaaagggatttctatcttcttgttccatcctcagttttcagcaagccttatatgcctgtctctcccctagtggtaacagatcattctgtttttattggtgcagaatcctgggccaaagaggttatcatactgctcttccaaagagggtatcttgaccctctctcagtggcttctaccttccccaacccctctgaacaggcgggtcccatgggtggtagagtttagtatctttccttcagtttagtatctttccttaaatcttacgccttttagaagaggagggtctggaaaatgggtttgacttcatgtttgtgtgtcactgaggggagcttcttcctatctcttgtcctacgccttacttttttgcaagttcccaatagaagtttgtggaaaagaattccagaatgagtgcagactccttcggtctgcatttccaaggatgctgaaatgtcataccagcccacacctgacttttaagaatgccttacaattggagctattttctttttcctgctcctacgatgactacttcttcctccagttccctgccaaaggtaaacctttcatgtatccagtctctccttggaggagattgaagtactttggctcacctcgttgccttgtggccacagctatataaatggctcaaaaaataatacgtttttatagatcaccctgctttttctcattgggtggagcaacgttcttatatagcatttttacatcctaagcagaagaggaacttgattatgatggaaagcgtaagtattttaccctcttgggatatccacattcgacatgttaatcattacagttacccttactttagatggaaacaatgaataatacttatttttattagagaaaggccgtagtagataagtgatattttaaaaattgaatttaataaaaatgtattgaggacctgttatctgtgaatcacccaatgggaaaagtcatgaaaagctgaagaaaacacttcattgtatttcagagcttttaatttaaaggtgaagaaaaaaggtgactcaaaagcattttgtatattcagaatccatttgtgaaacctaatttgtgatgttgaaactgagatttggcacactgtccaaaattgcattcaaaagtgtagaacctgctgtcctggcctttttgttttgtttgtttgtttggtggggtggggtggggtgggcgtaggaaggaaaaagaaaagataaggagtgtggtattgactgatagtttattctcaagtgcagtcaccagggagttcgaactgacttctacttttgaagttgaaacatggaagcagggctccaaaattttgtatctcattgaagtaacttagaatactcacacttttatgaatgattgagatacttcctaaaaatttaaaccatgatatctccaacaacggaaaagagggaatatgaaacccccataggctacgggtgtcaatcaaaatagtcttcggagaaatgaaatgttttcttcatttactataaaattgaagaaaaaatttcatttttcttttttttcttttttgagacgaagcctcgctctgtcacccaggctggagtgcagtgacgcgatcttggctcactgcaacttctgcctcctgggttcatgcgattctcctgcctgagacttgcgagtagctgggattacaggtgcatgccaccatgcccggctaatttttgtgttttttagtagagacggggtttcgccatgttggccaagctggtctcgaactcctgacctcaagtgattcacccacctcagctcctagagtgctgggattacagatgtgagtcaccgtgcccagccaaaaggttcatttctcaagttttacaaaacttttcagtcaaaattcacatatctactgtcacataattcatactcaattacattccttcaaaaatgctctcacacaaagtttgaacacatcgaggcaggtggtttgaaacatccatcccaaagttgagctgggagtcaaggtgacaagaatggcccatgagcagtgagatgtctaccaatgccgggctccggggcaaacaactaacattaagtgcaaaggattaaacttgttaattaggagaaaataaaagcaggcatttgcttattttattattgagtttatattaatagtaatcacttccattcatattagatgcaaaggaacttttaatattctatgcactgacttaaacttatttcttaatccctttcatctccttataatgatgcatatgagattattggaggtttggaggtatgcactaatgcaaagtgatgagctgtaaccaaaaagtaaccaagaaaataaaatcacaatttcatgcatgtatttatatttgtcttctatggcaaaccatggggatattgaaatatgaaatttcaaataccctctttattatgttagatgcattatttttaacaatagaagccttaaataaaatattaagatacatttgtattttgacacttaactgcccttggcattgtgcatttaaacttttggtgtctagcaaagttaaagggagactgtctttaaatacatatatattgatagtgccattttgttagacatgtcatctttcgaatgtaatgatattgttcacacattgattttattgatgatgttaaatcaaaatggtttctgcaattagtaacttctataaaacaaacatattaaaaggaaatcatacttcctattgtagtataccaatttatttttccatttaggaatagctatgctccctctcatgttttgttttgtataccttactaaattaaatattcattttattctttaccagtttccatcacagacacaatcagtattatttaaatttcagcaagaaactaaacaagacttacaagtttttcagtgctaatgatttttttttctcattaagtctgagtctaatgaaactaaacagaaagttctggttggattccttggtcacccctatctgtgtttgtgaattcctataattggcatgaattgaaagttcttgttatcactgatagtaacccagagacaattccaatttgggtttaaatggccctatgcagacaagggtaactgaacaaaccaaaacagcttcatgtgtttatggcagataaataccaattaagtactagaaatgacatcagggttttttttttttcctgtatagtttcaagttaagagactttttctcccttgagtttgcagatatagagcatcatgaccttacaagaggaaggagagcaacttcccatctgaatgagagatggaaaaattatatgaaatagaactaattctactgttaagcagtaaactacttattacttgagtattaattaggacacttggctacaaataacttataccaaatttgaactatctttatcaaatgtggaatttattccaaaggatacgtttattctaaggattaaaatgtttctcaaggcaggttagggcaaattgcagtacacctcagaaaatgcaatcaaaaccttccaggactctctgtcacatctccttctctctaaactatcttttttattgcagattggcttccgctgttcctcatgtagcagaccatgattgccaacattcccttatatttatatctcgcagttgaaggattcagggagagcctgattctaagacccaagtctaaattctttaaatacatacgtatgtatgtgtatatgtatatgtatgtatatatatatatacacacacatgcattcatgtttagatagacatacacagacatatatgtgaattacattgaattacatatgaattacatttctatttaatgtattcaatgtaggttacaatgcaacgttatagaccttttcatccattacaggtaggaatgtggtttaatatggaatttttgagaagtaatttgaaaatatgtaccaaaacttacggagatgatttttcacctaaatccattataatttttgagactcttttctaaggtaataatcccacatttgggtggaggctttatctatattgatagtaattgcaagactattttaatagcaaaaattatgagaccatttttcaaggttccaaaaaaaagcagaacggtaatttttatgggaacaaagaagacaatgcttctagatatttaaattgtgtttgaacaacattggaaaacctgttattttaaatgaagaaagtaaggtgtctaactacttgtgcaatgcaattacaattatgcaaggaaaatgcaaaggaaatatatcaaactttaaatcctaaagcttttaatactcactttttctctagtttctaaaatttggctaataaacataaatttaatttataaattaattgaccttggcattgtataaacatcagggtaaataatgcatctgtctctctgtctctctctcgctctctttattcaactttatcctaaagcatcatactaattacaatctattggttttagtttgactcctcagctaggttactcaaacaatgaaagactacttttaatctctgaagatgtttctttatcttgaattttgatttcctaatcaatgaatacttgtctaaatttagtattaagttcacacacatcttttctcttttttggattactttgccaatcaataatgttcctcttttagcggttactggttatttctactgatctctgctgagagtttattctcagacactttcataccacgctttgaaaatactggtttccaagctgtgaattcactgtatctatgcagaaaggagtgatttgtttcttgtatggcatgatgttttttatatcctgtgaaaaccatcaattccacatttgagtggttccttcatgacatgggctgctctaactaaagaaaaatgtgcattaaaaatatgtgtccgattaaggcattaaaatatcttaagcagtcaggtagcaaacaaatctttctgagttccaattactgtattacattatgtcaatacttactgtcaaagtacattacagaaaaaggctgggctcttttcagaaagggcattgcaatataatgggtgacaagaaactgcatctgtgtatatggaagcacaagaaactaacaacaacaaaaaaatagtgcccaatcctaggtggctgaagagtaatatctaagagaatatgaagaaaacccattatttattccctaggccagataaggagccctggctttctctggcatagctgcagtgtatataattatacctctttcagtgccaattactgtgtgtatatccataaaaagaatggtacaatggtgacagagatgaagagcagatctcttaaataaacatgtaaaaaaaagcaaagtaaagaaaaataataaaaacaggtctattgctgttaatgccactgttccagaaaaaagtaaaacagagatcattaatatccataagagccagaataatgtctatatttttcatccaacatttttcaaaccatggagcccttttagaatctgctgatgactgtggactctcatatatacacactcataaaattttgcccacaattttaggggtttattccatagtcgtattgaaagcccatagatttcaggataggaataacaatgttgattactcatttggggccagacactttctatgccatataaagataatggcttatttagtcctcacaacgacactatgagatagttattattttagtacctattttacagatgagaaaactaaaggaaagaaaagttatgtaaataaattgagaaaactcagccagtaagcggcaaaactggactttaaatccaggccgtatgattccagagcatactccaacaaggactgtaaactgcatcctgcagaaacaaataaacaaacaaaaacctagaataaagaagcagatgatagagttttagaactggcggaacacatagaaattatcttttccaaattctatgttttaaagttgaggaaattgtattccacataattaaatgattaacagaagcccatagagcaagttagtgttagagccagggttcaagtgggaacattcatccaaagctcatgacaaagctacaccgatattattatcattattctacaggtgaggaaacagaggcacactgttaataagtagcagaactacctttcgaacccagataggcaggttcaaagctaaaactaccatattactgtaattcaggaaagccattccctttataattcgtttagtaggcgctcggaatgatcaaatctttaaattagaaaattcgaatgtcttcaatttacaaactttggaaattctggagattctactttacaatcattttaatgttctctaatcaaaaactaatgttttcagtgtgctacaattcatgaattttatattcatatcagaatataaaattatacacatgcatatatgaactttatatgttatatatgtatgaagcttatgtatgtatataacaatatgtatatgaacacaacctgaatacatatgtatatatagataaccattcaaacattttaaattggctatagaggaaagcaatttgccatttgacttaaagtcttttgtaatgactagaatttaaaataaagtttacaatttatgaagatgaaataaaactatacttaaaatgctgtttttcgaaacagaaaattcccttaaaacctcaaaatctattgtttgttttatataataaaaatccaaattttttctacaatgtctaaatcttttgtaattctgttatattttcctctacaagttcaactcagtgatacctaagtgcaaacaataaggctagtatgagagctttttttttttgagacggagtctcgctctgtcgcccaggctggagtgcagtggcgcgatctcggctcactgcaagctccgcctcccgggttcagccattctcctgtctcagcctcccaagtagctgagactacaggtgcccgccaccacgcccggctagtttttttttttttttgtatttttagtagagacggggtttcaccgtgtttgccaggagggtctcgatctcctgaccttgtgatccgcccacctcggcctcccaaagtgccgggattacaggcgtgagccaccgcgcctggccaaaagttacttaatttgcatgccaacctacactcacatctattaaatgattagtcaatcaagatatagacaaaactcatctattggcaatgtacactgagggacgtgttctcggtgtagtcctgtcaccgatcttagtacagaaataaataccttttttaatccagtggcataataaacctgagaaaagagaagtctttcattaagaatcttggaagaagcagtcgttaaccacttgtcatcagtattagcaactcaagctgaataaaaattgattgtgtgactctggaccttctttgctctgccacttggataatctattagcattggcacctgattaactctcaaaactgtctcctcttttgattagctcccaggatttcttttgtattctcagtaataattttccaaacccttttctaaaagactgactctaatgttcttttactgactgcaaagtttcccgtcagtgctgaaaacatgtttggccttcattcctatttataatttttggcttgatctttcataaacactggcttaagacttccgtatttggtgaacagggagtgaatgattactccgaaactttatttctgttttaagtgctttcagtatttggcacaaggtggaaatgagcaggctcagtactgaccattgctattacaataactcactgcatttccttaaaacttattttccacttaaattgttttctacattgatttctgtctgtgctaatacttggccatgtatgagaacaacctgcttgttttaatgtttaaattttgaatggtatggtaaggagaaagaccaagatttaaaagataatatattctgaaagggcaatttttggaaagcttttaatacttcatttaaaacccattcttcagcttattttaaatttaatgatggaatacaaccctctcttttttaaatgaagaggttatatacattccatcattattgaattttattctatgggccacatttactatttacctgctatattagtcagctttattataggctaatgctctgtaaaaaacaaatccaaatctcaatgacttataagaacaaacatttatttcttattcacatgtcaggttcaattttgtattgagtacaggtcagctctatgcatctctccttttaggaacagaggctacctgaggcgtgtacttcccctgacaaagggaggaaggaccaagaaaagtgaaaacactttatgattcttaagcccctagctcagaattgacacactctcatatctgactgtgttccactggtcaaggcaagtcacatgaccaaggccacatcagtgagtgggatgtgtaatccacccatggtgaaccatggcaagtggaaaggaggaagaaaaagaaaccgatgagcaaataatgtaaactaccaacttgttcaagaagttctaatgcaattaaatatatagtcaggaataataatactgatctctattggcacttactttgtactaagtctttgcttaagactactttcgatgctttacaggatacctcatcaaagtgaagctaagagtttttttaccacgattatttcctcttttcagactggaaatcttgggtttggtgtggcttatgagtcttttctttctttgttttgtttgtttgtttgtttgtttttgagatggagtcttgaactcctgtcggggctggagtgcagtggcatgatcttggctcactgcaacctcagcctcccaggttcaagtgattctcctgcgtcagcctcccaagtagctgggatttcaggtgtccgccaccacgcccggctaatctttttatttttagtagagacggggcttcactgcgttgatcaggctggtctcgaactcctgacctcatgctgcgtccacctgggcctcccaaagtgctgggattacagacatgagagactgcacccggcctatgagtcttttctaacactgcataactagtgcatgatcaagccaagaaatgtgggcccaaattccactacagagagcagacaataacgatgctcctatgggccattctggattacatatcccatgcaacaattgaggagccctacagggcatgcttagcaattgttccattgtttttttttttttttgtcctttttaatacatagacttctgtccctcgtttattgagggttgcccctgggagaactaaatctctatcacttctggactgccctgcaaatgggcttaccaagccctcctaaactgaagaaagccttaacacaaagaaacagagagatgtggatgcttgtggtgaggaatcttcagcatccacagaatccgttcactatagttataggtgaactcagggatggctcggtgaaataagggatgaggcattatcctcatctactatgccattttattaacctttactccatagtgtaagttgagtaaatacatcttgtgatttaaatatccccttataatccaggccctgtgtttgaccatttgtctgtttctaaagcatctcattaacagtatgtttggaaatggctgttgtgtgtcgtgcacatttggctgtttgctttccttttggtttgcaaagaagtattttgcaacccataaaaatagataaatatacaccacagaacaatgtatttttttaaattttcaggggagaatttgaatcttttaaaagtaatattgagtaggcagctgtatggaaacaggcatctagttagcagttctgctacaatatccaagtagttaatttcacctctaaattacactggagaccttgaccttattttgatttattctgtcataattagtctatggttattactttaacaaaaataagtcatctttctcatgaacactaccaaagcacatttcaagtctgcatactaattaatagtaacttatttttactcctaacaagtctacacccacatactcatgtttaaacaagatgagatatttgaaatcactttataaattataatgcaccacagaaatatccattatttccattattactaaaaacttacttcattcttttgagcatgaggaggtataatttatgtgaatatcatttcatattttgtttttatctttcaaatcgagaagacttgaattttttgcatatttacaaatactataaaaatcctactaattattaacatggctgccacgtagcaatcgtgtctattttatgaaataatgtcatttatacagaagacccacgggaagttgtaatatatttggaagtaaagatttataggttttgtctatttttttctctttctcagcattaatatgtcatacatgtgtcacatttagtcttcacaattcagtatctttattactattaccatgaaacaaatagaggcaatgagacacagagaggttaagtaacttactcaaggccacagagataatgagatgtgaaactggagttggaactcaggttatttgactctgaaatgagtgtatgatgtaaccccggcctgcattgtatctaacacatgcaattttaagaggataagaattaactgtttgcacaatctaccagatggcactgtttttccaactgagaccacttaacaccttttcatatactcttggagttctgatcattcttccactctaatacatttcttcaatctcattgtcattatgtcctacttcatgcaacttcgattaattcttcacaagtatatttctacaatacttgtgctatgtttccaatgtatagagcattgcaatttttatgaatatacaactatgcgattatgttaggttctcaccataactccaatttgctaatggagcataaattctgtgattaagtggcagggaatgggagagaacttttattcaatatgagctgacatggctttccaatctggtttctgagtccaacaactccctacaataaaaaagcaattgacctacctgagaaagaagtggcgtttgcagtggaggcaaaggaacagacaggtcatccatagcattttacattgtgtcagaagcatgacagtcatgaaagatgaagtaaagggcaattatatcatattacagagtgaaattcacctagagaaataaaggcagattgtttgcaagaaatattctttctcttaattttttattcattgtagtgatgaaaataagtagcaatatttcagttccaaggctaaattttggggagaagtcattgaaagttagttttatgtctaatgggtgctcaatggataatttaggaaatgaattggtgacagaaggtctataattaacagagtagtttgagcagtatgatgaagtgcagggggaaagcattggtctaggacttagtagatctgagatttaattacagtattgattagtcacttgatttattcaacaaacccttactaagtacctatttctgcttcagtataccatgtttggtgccaggagttgcaaagacataataattctcccatctaagtgtggtcacatttaggaggtaatgagtgggatttgggctgcattattggaagacaacaaactaattttctgtttgtgtgtgtgtatgtgtgtatgtgtgagtgtaagcaagatgagatatttgaaatcactttataaattataatgcacacacaattaaagtatctgtgtgtccatacacatacagttaaagtatttatgtgtgtaacacatatgcataattagaaaaaagcctacacatatgtatatatcagaaggattgattgataagttatgccagggagataagtgtgattgtgaaaaccctcacattcgacctagatcttaatagtgagtgtcctcattctagggagtgcatgaacaaaggactaaagcaagaaagcatatgatttatttatggagaaatttggcttgtgtgactaaggcagacctggtagatgtatataaggtttgggatatgggtgactgccaacaggcctaatcgataatatgtttagaggagtacactggagtcaaattgtgaaggcccttatatgccattctgaataatctagcctgtaacctcatcagagaagctctggatttttcaagttagttctcttaatatatgattgtaacagaactgtagtttctccatcagggaatttagctttatcattgattatccatgatccaactcccctaactccacatataattaataattagtacttaccaatactaccccgtaaacacatcttgaatgcacctactccttttccagccccactgccattcattaatgcaagtcatgcttacttctcacgtggattataggtataatcagctcatgtgtcttcttatttacagtttatccccaaatattctctacactgtgaaatttatttctaaaagccaagcctgacattgctatttccctacttaaaattctgctttgatttcgaactgccctctggctatattttcaggctcttcataaataggttgatgataatttcactttttctagggtcatctctgccatttttatcctcctccaccatctctaggtctgggaaaggaccatactctttctctcacatcctgacactttcacctgctcttttgattttctggagttctcttttctaccacttgtctctctgctcttaattaactttcaaaactcagctgagatgtcacttcatcaaggaagctctggatttttcaaggtagtttccttaatatatgattgtcacatgactgtagtttcttcatcaggcaacttatctgtatatttgtatcaacatacccttttgttgtgtctgcttctctcactaagctagaaggaaaaaagctagagacactgcctttctcacagttgtttttctaccacctagtaggtgtcagtacacatttgtcacttaatagccttaaatatgaaatgtaatttattagtttcctattgctgctataaaattaccacaaatttagtggcttaaaattatatacatttattctcagacagttctgcaggtcagaaatccaaactggaacttactggactcaaatcatgatgccagaagggctgtgtacttttggatgctccaggggagaatctgtctccttgccttttccattttctagagaattcccacgttatttggctcacggccttcttcgtacatcttcaaaaccagccacctcggaccaagtccttctcatagtgctttctaattctccccttatgccaacatttccccccttttaaggacccctgtgattaaatcctgcccactcagataatctgggataatctccctatcaaaagttagctaattagaaagtctaattctatctgcaataattccactttgccatgtaacataatttattcacagatgtcagggattagcacgtggccatttttgaggaggcattattctgcctaccagagtttaatagaattaatatctgcagaggagaaaaatgagaagaggactaaaaagtaaatctggtcttcgttaacttaaaacacctttattgagcactactatgtaacacattctatgctaagtgctgggattacagctctgatccagacagtcactctcttggaaatgagaaaggatgtaggtgatgttattaagaacaacttttgtaggatgatgagcagtgaagactgcattacattgactgtaaagcgaatgggaaataaagaaatatctttgacatgaacagcttttctgttcttcgtgcagaagtttaattattttagacctcctcattgtaagctgaccactaacgtcacctcaggcggtagaaaaatcccataatcaaagactattactcagatttaatagaaagcatttttcataccattttccattgcagcctcctccactctgcactgccattttgtaatattaatggcacagtaaatccactttctaaatatgtcctaaatttgtttccttcctttataatgctccaaaatatcacataaccttatctaatgtttatcattaatcttccatatttttcatttttttctcatgtttgatggaagcagagaatagactgaacttaattgctctcccatattacttcatagttctttattttcttttctttcttttttttttttttttttttttttttttttttttgagacggagtctcctctgtcccccaggccggagcgcagtggcacgatcttggctcactgcaagttgcgcctcccaggttcacgccccagtagctgggactacaggcgcccgccaccacgcccggctaattttttgtatttttagtagagacggggtttcaccgtgttagccaggatggtcttgatctcctgacctcatgatccgcccacctcggcctcccaaagtgctgggattacaggcgtgagccactgcgcccggcttcatagttctttctttaagtgaaattaactcatcccattgcatttcttcactacgtgagtttctaaactggtatcaactttaatattcccttccccttttaaagatacattttctgtgtcacattagggatgaagatcttcaattaacatattaactagcccccaaggaaatatcatttaaaaaatgtttttctaggccgaatgtggtggctcatgcctgtagtcctagcactttgggaggctgagacagaaggattgatggagtccaggagtttgagaccagcctgggcaacatggggagaccccatctttacaaaagaaaaaaaattaaaaattagacagatgtggtgatgtgtgcctagagtcctagctactgaggaggcagaggtgagagaattgcttgagcccaggggtctgaagttacagtgagctgtgatggttccaatgcactccagcctggggaacagagcgagaccttgtgtcaaaaaaattttattttcttgtacagattatggttaattgctttgtgtaatgggaataattgttagtgtttatagaactgtttttctgtttttttttttcccccagtttttaaatgctttcacttacattgtttatctgatggcagagaagaggtcttaaggaggctctccagcatctcgctcctaactctcattgcaatttcattccatgccactccctttctcacattttagagtgcaacaaaacagaattgcataatgaatgagcgtgtactttcagtttcttatcactctgtccttgtccttactgtctgctcagtgagattcatctttatcctcctcctacctttattccttctttactttctctcatccttctgaactcaacctacccattaccttctccaaaatatcttttctaacacccatgtggctacatattcctttctccatgctcctataatacgctttaaatttatatatatttttgtttatgcaaaatgtttcatatttatctatgatgtgtctattatctactaggctaagagctctcccagactgaatcttgtttatattttcagtaactagtgcaatgtccaggtcatagtaagcattctgtaaatatttattttataaattattacacgagtaaatgatctcattatatcctgtcaatagctccatgagttaaagagcaattaatattctcatttcacagttaaagacgctaaggcttggcaattttaaggccacaattctaataagtcctgcaaagccactggaagccagttccacagatttaatgttccctcagtttgcccagtatcattcttctgcagtaacttgctcttgtgaatcaagaatattgcaatttaatatatcccacatttatattcctgagggactaaggaatataaaagttaataacagggtaaaagttcattgtactaatcttaaaaaatatgaaaggccacatatactgaataaaaataactttattagaaggggttaaagattactgagaggaaatacaatttttatgtcatgttagaaagctaattttatatgggatttccccgtagagagaataaaataaaacgttggtcagtttttgcaatttatgaagtagtggttcttcacttcttgacatctccagggaacagttttcaagtaaattttcctaagagagattttcttctttgcctctcttattaatatgcacatgcatgtttttattagtaaaataaaatcagttataaacaaaccctaaaggaaatgaaatagaatatgtgctgcttgaaatgactaaacaggagcatataatcattttgtaataaaacagctatcactttattcttttctcatttgctttgttgctgattgcacattaatatgttttactatagactatgtgactacagaaatagacatcatgttaacgtatcaaaatagtttctagaacaatttatatatgtgtgatgtgtatgtatggtggctttaggttaactaagggtatacagcttaaaatagtcaacttttaagcaatatgacaaatagcaataaaaatatatcaattcaagtaaatacgtataaaattttagcatactaaaataaaaattaaaaggcatatgaccacttgggaaaatatgtccattcactgactaaaagtgagtagcttaattttgatcgttaacttggattttatggttataggagttttctgcaaggaggtcagtgaactctatgaaactatatgcaaatatgtatgtgtagacatttttctatagagaaggttcattattttcatcagataatcaaatggagcccatgacttgaaatgtttaagaattaccaatatataattatctcattccaattaattttaaaatattaaatgctcaatagataaatgagccaggatgtaaacaagtattttgacaaaaataggaacatacagaataaataaatgcatgaaacatcttctacttcattagtaatcaaattaattatgattaaagcaaacatcaaggatctccttacatctaaacaaagcagcaataccgtaaaagactaaagcaacgaaactcctatgaatgacatacctgcggctgagatgataattcccaacctcattctttctgctaccagtagaagtgggtgtgatcacttggaaagtattataaagatatttagcaaaagtcataaaggttttcataatgttgaactgataattttttcgaagacaattataaaaacaaaaaagaagtgagtgcatgagcatgtttattgtgatttagtctctaatagcaaacaaaaggaaagagcagcttatatgagatttatgataaaataagtgaaaaagaaagaatattattttggttataagaaatatgtatttatggggaatttaaaagtgtggacacaaaaattttgattgatttttggatgttaaaatgtttccataatgatatataagacgaaaattgaaataccaaatatcaattagtaaatgtaaaagcattattatttgaagtattaacaaccatatcatccagcaccattaaagaaggctcattattcagttctagatcagttcatacagacaaataagttatgcattgccaaattccaggacgctattcacataggttacaacatacatggaacctccttgagttgttcaaaatagaagctctgatttcatggttgttttgcatttgcgttaatatgttcaccttttgtgactctgattatcttatggtattctgtattgttaattatgcaattataatgtaaatgatagatatctggtcaatgtgaaaagccatggactttgattcagaaaatctgtatcaagttcatttctgtcacttaatagctttattccttctcagcttgtgtttatgtataaagtagtaaattacatacagattgagaagacataattaaaacaaacttatgaatagtaaggcactaagaattgttatgtattttataataataatacaattaattgtattaataattattatgttgaagaaaatatatgctactataccaaaataagacaataattcattgaagacatttttcttgtattaaagacgtagaggtgagagaggacaactagcaaagatgtttatatgttgaagctcacatttagtgttatttacacagtaaataagtaacactttgcacataatgtcaaggttttcgtgctgccttcgatgcttacctaaaaattactccttgtccatataattgaaaagaataaaaattttattctactacgtatttttcacttaaaagcctctagattaaatcacttcaaaagacctcatattgagcttttggcagagggttttgggtatgtttcaaagacatctgaatgtatgctttcaactgactcatttactctctgctttctgacagaaagtacgcatgcacatgtaggaaatataagtggaattgcaaataaggtcatttacttttaggaatatatgtatatactactgataaatgatgcgttgaccaatcttcctccataaagtctatgaagatggtttaattttgaccatttgaaatgttccatttctttttaaaattattttggaagggctagtattaattttatgaaagtaaagatttgaaggaggctagaataggtttgaaaactattactatctgtttttatttattcacccttgtcaacaaaggaaatacttccatattgtagctaagatttatcatataccatatgaataatgttgatattgaacatacatatagaagcttgtgtgaataacataattaaataagaaaaatgtattttgtaatgctaaataaaatttctcacctaagatgacagtttgaaatttatttattcactgttatttctcatattgactaaaggaatctacttatagattagtattgtgatttaaagataaacagatatttttggtgcatgcatatatttgttatgcgaaagtgattccttatgtttttaagagaagcaacggagatttactactgaaaaatatatgagagcaaatatgattactttgtaaagggcattttaataacggttcttttaatccaagtagataaaatataaaatttatcaattttaaatatctctcagatgcattcatttactgaacattaactaatatgattatatttacaataattaaaaaaatagtcttttgcttggagaaaaacattttaatatatcaagattgatgatttttctgtccatttgacttaatactaatttccagtttaggggcaaaaagatcatttgtagaagcatgaattcagtgaagctgttttttaataatttttctccctaatcccttagtataaatctttggggacttttttctttgagtatttatatgtaaggcatgaagagtatcatttgcatttttatttgaaatgttctgacttttagatgaaaagaggtcctagaaattttagagttgtagaatctccccttccttaaagcatgcacgtatttgtcagatgtattttctgagctcttaatttgttcagacagtgtgctaagttctgggaagcaaagataactaaaccatgctcctgctcatcaggaaacctcttccatagtgagatcaggcccatgttagagtatgtagatgctgcaaaggaaggaataatcatttctccatggttgggtggatggcatggggaaaggctccgaaatagtttttcggagtaaatgacagctgagagtttcttttaattatactggagtatctattcataactggcgaataaatactgttattcagaggagactatttttttataatcatacagtatttgaacgactatgggtttggtcatattaattgtttttcagatattacaaatctgaggcgggatcttgctctgtcgcccacgctggagtgcagtgccatgatctcggctcactgcaacctccacctcctggattcaaatgattctcctgcctcagcctcccaagtagctgggattacaggtgcatgccaccatgcctggctaatttttgtattttcagtagagatggggtttcgccatgttggcctggctggtctcaaactactggcctcaagtgatccgtcctcactggcctcccaaactgttgggatcacaggcgtgagccaccgcgcctggccatttttcagaagtaattttaatttggatgccccaaaccagcatcactcatgtttaattccatttatcaatgaatgtaatactaaatgtaaaaaaacactaacacatcataatggaaagttactttggttgtaaaatatgaattatatttaaagttgcttcctaacttttatttttttattttgcattttagatgaaagagaagatgttcaaaagaaaacattcacaaaatgggtaaatgcacaattttctaaggtaagaatggtttgttactttacttttaagatctaagttgtgaaattttcaaaatggactatgtacctgtgtatcttaaaaatccgttttatttctctcatagtgtcattttattttagctgtgcaaatctggaaatattatgttcactcttatttaaggagtaagcagcagaagatatggcaaagatacactatttaattatataaaatgtatatctttgattcttcttgacaatgtgagtttctttaatgacatgagtcctcagagtttatagctgcaatcttccatcaagtagctagaatatgtcacccagcagaagaagatatgagggaattttgttgtgaaaattatcatttttttgtccctcttggtctttaccaagttcaagaaaagcaatataattgctttgggtgtattcagccactatagtttagagcatatttcaaatgattaaagacaataagttcatcttgtttttgtgcaggcttcaatccatactcttaatatttacttaatttgcaaatacaactcaatttttaatcaatagcgtgactctagatgattataggtggacacagagcaagatattcttaccttgaaaactagtattaggaatgcaatatatggaggtttattgggatgtcaaagtttaaaagacttgcattttaattattattctcgatttgggtaaatcaatcaaatgtttggtgagtcggttttcttatgtttccatcatgaatgtttgtatatgtatatattgattgcttaattgagacatcaaatctagataatggaaaaataaagctaataaaatatggcccttaaacccaaggctttaagagtggcatagttttgatagtggatattttgtttcttattgtaatgatttaaagagtcactaaaagtgaaaatttctactaaaatgcctgaaactcttaatagctatgaattactccctctatgggtctgattttgtaaaattcatgataatggagccaaaacaatccactaggagatccaatctcaaaagttctcccttttctatgacaaacatttttagaatatcgtctattctttgtggtatttggtagtagaatgttgccatgtactctttaatttaacttactgaattttaactaataaaagttcattttatttacttgctgaataattaacaaatttctattacagacgtaaacagaaacatgtattttaaaaacgttttttaaatcctcaactttttttagctaagtgaaataaaatataacaacacaaatatagaagaataaataaaaagtaaacctaggatatttaggaaagttattcataattctccgaatatttataagatggttatatatagtttaattgctgtatatactggcatcattgacatttttaagttttggaattctgaagcagacaagagacatattttcaaacaaacatacagacaaatcagaattgtgaagaaattttctgaaatagtaaatgtaacaatactctgaatctttgaattgaactagagtaatttttaaaaggtgtgtaaacatgacaagtactgtgtatcctcattcccgcaagttgaaatagatcttcgctctgtgcattaaccttttccattatcatttatcacaactcacctgttaatatagaaatcaaagcttgatatccaatccatcctctatttatatattgttagcactgcctcagagcaattcggtatatttttttctgtccttatgaatgcccatatcttaaaactgtaaaatattcacatatatgagcacatttattgttttcttccaaaatatttgcatcctctaactcaactcacacttttcatttatattacaaatgttctccctaagtctgttataactgatcaggagagtcaccattctttcaagtacagaaattctattatcaagcatatcctaggtgtcaggaatagaaataaaagtttacaaagacagaggagaaaacttatttaaaggtaaaatgtatatatacctgtgcactaacttctaattttgagaacttgcaaagaatctttttcctcttttcttattcttttctgtcaaaacttagctaagtgactgcattcttttagacacttttgaagaagatgggaatttagaggaagctagttgattcagtttaagccacttggtgaaaccaaaagataaacataattgtgatatatatatcatttggcaatttattgcatcgctgcatgcctttcagcagaattctagccctgtaggatacacagattagttgaagtggaatctcctgaactcatggaacctacacagttatttgggagtttttggttaattgataaatggagttagaactgagtgggctcagtgtgggtggtctgagaaggcagtaatctgagctagagggaatctggtaacctttatgaagaaagctctaaaatgtgagcccatcaaaggcaggaatgtatatcttctatataatctcattgtttattactagtacactatataaatataataaatatactaggtcagtagtacaaatcattaaatctatgctaactgtagaaacagaagaaaaactgggtggaaaaattgtgttgaagaagactttaaaaagagaaaaaagagaatgaaaaattctgtctgtgtggtaaattagacacaggcacacacacattcatacaactataaaaatgcctcactaataaatctaactcatattcatttttatagtcgtattaatgtctatctgtgtctactttaccacacagacagatgataatttttcattgccttttatacacacatttatataatatttgtaaattatagagagacaacaaaatatttccttgttattttgtaaagctacggaagggatatttaaaggaaataaatgtgattaaatgtatccttgttgttgtggcgtcatttgaagccaaatgtgtctttgcagtaaatctaactgattttccactttcctggtaccattttaaaaataagccctatctctttttaaaataagtcttctattaactttgattccaaaaaattctactagaatgtgatttatcacatctattatatagagataactgaacaatatttatctccacataaacacaaaaccatttctagataagattaattcagagtaaatattctttccatgtaatttattgatatgttataatcctttaaaaagcctcgtgtatactctatgacaaatatgattcgcattataaaaatcttgctcatccatgccggcttaataaagggaagtacagttttgaaaacatgaccaaaaataattttgtcataaaatgtgcttgatgtttgtgtttgagaaaaaattttatgggaaaaaatatttactgccagctcaattgagagagataaactatctcccaatgagtgatatgatggttttgatcctatactgaatttagtaatcatctttatttccatactcactcttctgtctgatttttttccaacatagtatgcatgtttgacttaaatgaagtagaaatgcataattagttttgtctaatgtcttcacaaaagcccatgatatgatagtgttcctggaccaaactgaggattgggctgcttattcttgtggcccaataacgagatgcagatgaacgggaaaaggagagagtttttatttctgtaagtggttacagggagaagacctggaaattatccccagaccaactcaaaactataaagttttccagagcttatataccttctacgctgtatgtctacatgtaagtgtgtatccatctaaagacataaatgattaacttcttctgatctgtaactaagatctgattcctgaagacattcctctggagcctcagtaaatttactttatctaaatgggtccaggtgctgggatgattacccttatcttatctccggctaaatcatggagtttgggggagttccttcagatgcccagtaaacttgtttgtggagtcctggggagtttcttcagacccccaataaagcttttttaattctaaaagggtcctgttaagaattccttcattatcttgtcatgcttcaaggcccaggaaaggcctgggcaaaactcttggtgggcttttgttaccgtccagcctttgtttaagggcgctggctctatcagcttttaatatgtaactttaccactcagtcagtgctgaaacagttgttgtggaggcctgcattagtgagacctggcctgccacaatagttcatttacctcttcattgccgcaacatatatgtccacattaaaaatccaggactcaccctctttgggcaatatcatgtgataaaataaattgatatgacatacttcttgcaagatttctttttaatttaccttttagccagcatgataagcatgatgtagggtaaattaacactaaacttttgagtcagtaaggtagcctttctttttttaacttttattttaagttcaggggtacatgtgcaggtttgttatataggtaaacttgtgtcacgggggttggttgtacagattatttcatcacccagatattaggcctagtacccattaattatttttcctgatcctctccctcctcccaccctccaccttccgataagctccagtgtgtgttgttcccctctatgtgtccgtgtgttctcatcatttagctcccacctataagtgagaacatgcagtacttggttttctgttcctgcatcattttgctaaggataatggcctccaactccatccatgtccctgcaaaggacatgatctcattctttcttatggctacatagtattccatggtgtatatgtaccacattttcttggtccagtctatcattgacgggcatttgagttgattccacgtctttgctattgtaaatagtgctgcaatgaacatatgtatgcgtgtcttataatagaatgatttatatttctctgggtacatgcccagtaatgggattgctaggttgaatggtagttctgtttttagctctttgaggaatcactacactgacttccacaatggtttaactcatttactctcccaccaacagtgtataagtgttccattttctccgcagccccaccagcacgttattttttgataaagcaggcttcttcacactactctctaccttaggagaaaacgttatatccatactttaatttatttgaaaagaaaggtgaatataaaattgaaattctctgagtcttatttttcttatatgttcttgcctacttgtaacaaaacatataataaaagggcattataaatagtaaatcatataaacacaaaatattcccatttttgtcattatgtaatgtattttctgaattgaattgaaaaatgcatatatttatgaatttttttctactgaatctctccttcttatttacttctattcttttccatgatgttacctggtcttcttgagaacatgatattttaattgtaatcattgtgttcctaactccataatttcatgatgctattgaaatgcacatgaattttgattctataacctagtttgtaataagccatatttccttgtttctctacattggttgaatctgttcctgcagcaactagtaaccccaacaatctgactggtgagaaattcaatctccgtaacattttgcattcttctacttcttcccacttccattccaaagggccaggtagagtccagaatactgtaagtgtcctggttttcagtgcattttggtcatagctgatatgcttaatagccaagtaaacatgactacataaaggacagcttgtccacaatgccctgccttgcttgaacacggaaggttttgctgatgatgctctgtgcttggtatctggcctctacagccatttaagtaggttgtctcagcacaacatttggaaactctgtaaagggagtaggatgttggccttcacaacttcatccctttccctgtgtttgaggaagctcattaaacctctctttaatctgactgattgcaaatttccactgtccccgaatcttaactcccatatcccaatagcctgttcagttgggacaatatatcaatccttaacatgaatctagattttcagaactaaagtttttgaagggtgattttcctctggatacttgttcatttctttattgattatggttttggctaccttcttggcatcaaacagggaaaacagagcatttattcatgtgttactatcctattacactctgtatgccaattcatgtcctcaacacgtacacacaaacacacacacgcgcgtgcgcgcacacacacacacacatacatatacacacacccagtaaacatattctatatttaaaatgagcttagaagtttttaaaaaaggatgatactgggacaaagtggcaaaacattatttcagtgaaggaggtaacaatatatatgtacctttccattgtgtaagtgaattctaaatctgtatatagctaacacatttatatataactattgtgcaatgtgcctgctttaacagaagtaatcgagcagagctattgtgccatggaaggttttacatagatctaaaatggctcctgtgcccctggcttcctgtttgtttttatctgataataggaagaattaaatcattagagcagatgacgtacagtgaactatgtctctggatgctgatgagcagcctgcacaagactttggtaacaattgaattatttagtgcaattattttggagagatgaatattgatacaggaaacttacggaaatcctcgtttcagaaatagtgaggattgggaactttttgtttatgtataccatgatgttaataatcctactgaaaattatatgtatatggttagttgctccaataatcatatgatacaagtattcaagatgagtaaaatgtgaatttatgtggcttgctcacagtaaataggagagatgaagctaggacccaagaaaatggactctaaaactcatgatatttccatacctattattgttgggacaaaaattccacctacccaataatgcatttttgggacaaatcatcaaattgataagtcctatgagaagcaggcaggggggttggagacagtgaagactcaataacaggtggtattaaatgctcgcttactcacagaggatttaatctacctttgaatgtttagtaaccccaaaatgcaaccattgtttaggaagttttttagttgattctttctgaatgatttctaatacaaatgcccctcaacttgtgtggttaggtccctataaacccatcataagttgaaaatatcacaagtcaaaaatgcctttaatatacctaaccttcgaaacaacatagcttagcctaccctactttaaatgtgctggcttaacactatcctagagctgggcaaaatcatttcacacaaacctattttataataaagctagctcatgtaattgattgaatactgtactgaaagtgaaaaacagaatgcatgtatgggtactcaaaatacggtttctactaaatgagtatcaccttacactattataaggtcaaaatatcttaagtcgagaactgtttgtactttaaatgttaatattttttacatactgcgttttggtgagtgaagtaaacttagtttgcagtagagttatctaaagtgatattgtcattttcaaacattgctttttatttctactactcataaacaaattattgtgtttacatgattatttgaatattaacttaaaacagttttatacgaaattcaaaataccactttactggcatgtgaactccctaacatctacacttggtgttaagatgacttgtcgaatgatgtgtttgtgtttggaatcaagatgattatactaaatggtttaatctactgagaaccattcccttgaatgttttcctgaaacaatctttgcaaagtacctaagtaacaaaggatattactcagttagtgagacaaaaatggattgtgataggtctcactgttttcaaagaaagacaaatcacttattgttaatagtaaagaagtttcttagaaatatgttgctgtttatcaacccagtgttactgagatcttgacaattccttttagaaggtaaatgttttggtctctaggttatcatgtcctgatacaagaaaattggaattattgattacacctatattctctggagtggtctcagtgccaagcatatttagcttgcatatgtaaatatttaccaattagcatgatagttgctagcaaaaaaaccaattctttatggctgatgggcctatccattatttatctgattttattttgctttctagcaaaacaacatacatggacattagtgaagcatttttatttagaaaagaacaattgacactctggtaccatcctatcagagatatatgtttactaaaataacctttcaacatttaacaaatacttattgaatgccagctatgtgctaatcatactgtcatacagtgatgaaggcataacccaacatggttttccctctccaagagattatcatctgagaaaggaaacaattgcatcaacaaataattaaaataaaacataatctttaatgcaatagaaatgctgtgggaacatagaagacagaatgactaattgcttggagaggataatagctttttaaaatatggtgacatttagtctggtgttgtctacgcagagacaatttcaagaaagatgaaggcagaaggaattgcatgtagaaatgtgtaataatcaaagaagtatgacttgtcaggtgagtagtagcaagggagatctttaggagtgaagaagagaggttgtgagagggcatataatgccattcttgaagaattatattgttgtggggctggttgagccaacaataagataatggcttagtcatgttaatttgcaacttctgattgaagactgtgaagctctaaaacaacaggcaatgatagaagaattagactgccccaccaccactaatgcttcatgcaaaatttggtctgaagtctaccctttacatttggcaatagacatagagacctaaaatggaaaagcaagcaggctaccatttttgtagagttgtttgataccatgcacactccaaaacgatgcagcaaaacgcattggaattacctagaaaatgtgttaaaacatggattgctgaggcccatagtcagagtttctaattccataggtctagggtgggacccaggaatccggatttctaacaggtcctcaggtgatgctgatgctgacggccaaagaaccacactttgagaaccacagtgttagaatttcagtaatttaatcaggtctgtagtagagaatgttggaggaaaccccactgaggaatttattgaaccctcaaaggggaatgacctttttccagttgagaatcaatgcaagtacttgatttaaattgggatttattttgtggggactatactcaaaaactgaatgagttaaaagactcaaaatcaatcaatctgatactgattgagcattcttcgtccaaaacgtttgaaaatagaaatgtttcaaattttggattttcgtttggaatatttgcattatacttactggctgagcatctcaagtccaaaaatctgaaatccagaatgctccaatgagcatttcctttgtgtgtcatgtcagccctcaaaaggtttctgatttgggagcattttggatttgggatttttggatttgagaggctcaacctatacctattttttaaaaaatgtgtatatatatatatatggatatacatacacacatatatatgtacatatatacatatttatacacatatatgtacatatatacatatttacacacatatatgtacatatacacacatatttgtacatatatacacacatatgtacatatatacacacatatgtacatatacacacacatatgcatatatacatacacaaatatatgcatatatacatatacacacatgtatatatacacgtatatatacatatatacacacatgtgcacatatgtgcatatacatgtatatatacacatgtgcacatttgtgtatatatacacgtatatatacacatgtgtatatacacatgtacacacatatgtgtatatacacatacatacgtgtatatacacacatgtgtatacacacatatgtgtatatacacatacacacgtgtatatacacacatgtgtatacacacatatacacatatacacacatatacacatatgtgtgtatatacacatatacacacatatacacatatgtgtgtatatacacatatacacacatatacacatatgtgtgtatatacacatatacacacatatacacatatgtgtgtatatacacatatacacacatatacacatatgtgtgtatatacacatatacacacatatacacatatacgtatacacacatatgtgcatatacacatatacgtatacacatatacacgtatacacacatatgtgtatatacacatacacacatacacacatatgtgtatatacacatacacacatacacacatatgtgtatatacacatacacacatacacacatatgtgtatatacacatacacacatacacacatatgtgtatatacacatatacatatacacacatgtgtatacacatacacacatatgtgtatacacatacatacatatgtgtatacacatacatatacacacatgtgtatatacacatatacacacatatatacacgtgtatatacacatatacacatatacacacatgtgtatatacacgtgtatatacacatatacacatatacacacatgtgtatatacacatatacacacatacacatatgtgtatatatacacacatacacatatatgcacatgtgtatatatacacatatatgcacatatgtgtatatatacacatatatacatatatacgtatatatacacatatatatacatatatacgtatatatacacatatatatacatatatacgtatatatacacatatatatacatatatacgtatatatacacatatatgtatatgtgtgtatgcatatagacacatatacatatatacacacatgtgtatatatacgtgtgtatgtgtgtatatatacacacgtatatatacataagtgtatatacacatatgtatatatacgtatatatacgtgtgtatatatacatgtatatatacatatatgagtatgtgtatatatacacgtatatatacatatatgagtatgtgtatatatacacgtatacatatatgtgtatatatatacgtatacatttatgtgtatatatacgtatatatacgtatatatagttgttttaggttataagacttaaaaatacttatctgatgtatatatatatttttaacaatcctagttattttgtgtttcagggcagataggtgatgaataaagatattaatataattgtgttcaaaggttagaaaaaaacagttcgttgtggcattactattgactgtatccgcaaatttctttcactgcaatcctttcatgggctactatatatttttcttaagaataaaacatttccaattgacctacagagtctttcaatctctcttttgtgctttactttgcttcagcagaaggatttcattttagtgacactctgaaggtcttcctctgtgcttcacttaagggtgttgcatttttaaccttaccaagattcctatggattcctagaattatatttcaaattatgatcatggtagccagaacacaaagaattaagatctactctgacagtaatgtactgatataactttaactgtagaaacctttcttgtaatgcacatggagggcagacttgtatgtatcttggaacataaaaggcagagtatggtttttaaaagggctttgcttatttgtatcctaatttagctaatttcactatgccagttctatatgcagagataagtaatagtaaaaatggacaaaaagtgatcaataaacaagtgatcactttcggtcttgtccagaattgtggccaggtgatgagtgcaaactaagagaccttttcattagaaatgtgtgaagttactctttggtttagcattagctgtcttttaatgagaacaaatgagagttgcagatgaatttgctaaatgtttctttctttgatttagtttacctggcctgaagaaaaaaaaatgtcttcgatctacaaggtctacggagagtacttttcataggaactagtcctattaaaattacctgcagttattatgtcagtcagagaataaatattttgagtatcatatctgtacttgaagttcttatcctttacaaataatttatatttaaggaaacatgctttgacagaaatacacatgaagtctacattctctatctatttcatatcaggtgctctagtgttttgaatataacagttaagagatcaagtccctttaatcataaggccctgttagctagcgagctaaaccaaagagggaaacatttagcaaactatctgacgttctctatatttgtttgtcaacttgtttgttttttctctctgcaagtagaatatagaatttcagagagtgacaagtgctaagagaaaaaataaagcaggataagggtagaatagggatatttcaaagggtaggttgccattttatgtagtgggtcctggaaaagcctcacttaagaggcatacaaaaaacctgaaggaaggaaaggagggcatcttgcaggtgtcttggagaagagagttctaggcagagggaagaatatgtacactctgaggagggagtgcgtgtttgtgggataacaagggagtcaagatggctggtgcagagtgactgaggaagagcggtaggatctgcaagtggagtggtattagaaggacaaatcagatagggccttattgaccattgtaaaggtcttggcttgtacattgtgggagattaggagattttgagagttctgaacagtagccagaaataatgtaagttagaatgtaggatgtaaaggtagaagtagagagatgagttagaggataatgtagtaatgaaggctgggtgtgtgcgtgtggctaggattaggttgatgtccatggatctggggagaaatgatcgaattttggatacattttgaaagtagatgtaacaggatttgctggtggactaaaaatggagattgagagagtggagaaaaacagttttagcttgagcaaaaggaaggatgggatggttatttactgggataagaaagactattgcaagagagagtttggtggcaaagtataggtaaatttcccatggaaaatcattgaaaataattttagttttagtatgtttttatggaaggagtatttattttcaactcctaaaatttatcctcaagaacaagaataaatacatttatctctattaaaaaataaggaacaatgagagatgatacaagtgcctctagcattgtatgagtgtgtacaaccagtgaacgttaacttgtaaatccagtagcagtaacttgatctttgtctctcttctgatctgatagagtgcaaggtctatgtctacattcatttttttgcatgtagatgtccagttgtttcagcattatttgttgaaaaggctatctttgctccattctattgccattgctcgtttgtcaaagatcagtaaactgtattcatgtgggtctatttccacactattctgttctattgatgtatttgtctattattttgccaatacactgtcttgattactgtcatttcatagtaagtcttgtagtcagatagtgtcagttttccaactttgttcttctccttcaatattgtgtgggttattctgggtcttttgcctttcatataaactttagaaacggtttgtctatataaggcaaggtaacttgctgtgattttgattgggattgcgttaaatctgtagatcaacttgaggagaactgacttctttacaatattgagtctttctatccatgaacactgaatatttcaccattcatttagttcctctgataactttcatcagagttttgtagttttcttgtaaagatcttgtatattttttagatttattcctcagtattttatttttgaaaatgttagtggaaatggctttgtgttttacatttcaaattccacttgttcactgctggtgtgtaagaaacaattgaattttatatattaatcttgtgtcctgcaactttgctacaattgcttattatttccagggttatttttcgattctttcagattttctacatagatggtcatgtcatctatgaagaaatacagcttcatttctacattccaatagatatgtctattttctttgtcttattgcattagctaggacttccaatatgatgttgaaaaagagtggtaagagagacatttttgtcttgttcctgatcttcctgagaaagttttcattttctcaccactaaataggatgtcaattataggtgtttttgttcatttttttatattgtcatgaccttgttttataaaatacaattatttctctcctaactttctgtggacctcaattataattttcccataattctcttctgcttgcattgctcatgttttctgtcttcttcccatttgttcttatttgctttattttgaggaactgtttctcattattgaagtcattcctcaaattacaagtgatcttagcttttggtttatatttaagtgtgagatactaacatttgataaaattaaaatctatttcatgattaaagtacatttaatataaaacagaattgaataattttgttgacatattatatatatatatgcgtgtgtgtgtgtgtgtgtgtttgtgtgtgtgtaaagtccaaaagtttgtacattacttaaagaagaaacatctgatgcattctggataaagacaggaaaaccatatgagtactacagctacctccattaatacttaacattgtgttgaaaatattagccattgcaaccagacaagataaaccaattcgaggcaaaacaattgcaagcagtggtaatgggatcccaatttacagatagaattgtttacctcaagagatcacacaaaacaataatattaacaaacacaaatatgaacacaaacaaataccaataaaataatttagtaagttagcagactataaaatttacaggcaaaatcagtaaaattcattttataggtaatgagctagaagtttttatggatggtgcacacccatttgcaacaatagcaacaacagcaaaaacaagaaacacatttaacaagaaatttcagtacctatgtttaaaactctcctgaacaacccaaaaggaaatcaaggagaaagatgctccttgttcctgaaaagcatggcttaacattataaagtaaactattgtttttaagttaatgtgtaaattaaaggcattccaatataataagtagtatttttttctggagttggataaattgattataaactttttataaaaaaatacacaagtaaaaataaccagaaaaacactaaaaataaatatcgatgaagggatagggaaacataaaattataaattaaaacttagggaaaactatcatattaaatataaattttcaataaaaactaacaatttgttaaaatgtgttttgtaaaaatatatttctatcagctgggaaggtctggtagtaatgagtatacctagcatgcagatattcattggtaagtctcattccacactgaaagaagtcacagctcattagaagaatatatgatacttcatcctggccaaggaacatagtgggtgagcctgcagcctttgttagagccataaggcaaggaagtacttcccaaaatttgctaacatcttgagttgttcatttttcttctcctgttttctttatgcttgtagagttacacctttttaaaaggttttcttcctgtcattttattggaaaggcttcaaataatttttaaaacatatttatagatgttcatactcatatattttcctgatactgaaagagaaatttatgcatttagtaacaataaatgttggcctagattttctctgatggtctcttcaagaatctggagcgttctctatctccacaaaggatggaaatgtttcatttcaatatgccagttttcaagtaaatgtgatttagtttctctcttttaagaataaagtcatagcagaatgctttatattactgattgtagtatcataacttacttctgaaacatcgaatacaattttggaaggtcagcaatgtcctgttaatatttaagtatgcctcactatataatatgtgcatacattctggaagaagcatttaaaatgaagactgtttctaataatatattaaacgagctatgtaagtagagttttatgatagctgatattgtgattttattcagagactatttatataagacatttcagcatatctgctaaagaacaaacctatcatctaagtcagtaaaccaataatttgaattaaaaaaacggacaaaaagaaaatacgaagcaacttgaaagatcattaaatacactgcctgatagttaagattctaaacagttacattatatgaatagtttactgtatattatatattttctatttccactttgttataggtaagctaatcagatgtctcaagttataaaataatagcactaacttataaaagaagtgctacctttcttccactccccaaaatacacaagattttattcttcataaatgataacatttgttgtttgttttctgtggttgaaagggaagtacaggaatgaaataatgtattttgcaacaacttggatagaactggaggccattattctaagtaaagtaattcaggaatggaaaaccaaacaccgtatgttctcactcataagtgggagctcaactatgaggatgcaaaggcataagaatgatataatggactctagggactcagagcagggggaagggtaggagatgggtgagagataaaagcctacatattgggtacggtgtatacttctcaggtgatgggtgcaccaaaatctcggaaatcaccactaaagaacttacccaggtaaccaaaaaccacctgttcccccaaaagtattaaaataaaaaaatttaaaattttgaaaaattaggaaaaggaagtacattttcatgtgttgctctgttttagcacacctggtgcagaggtccctgaggaattttttctttttcttttttcttttttcttcttctttttttttttttttttttttttttcgagaaaaaaatatcacacatttgaggcaggagaatagggtctggaggaagggaacctaaggccatttcacgctgacttccctaggactaaactgaaggcaaaaccctaactttccacccctaagtaacataaggaccagaggctactccctttgcaaacctcccaccttttctgtgtagcagatgggaaattggctgttcccaaccaatcagactgattgcgggcccagtctttgcacagaagtgcaactttgtaacttcaccttagcctctgattggttgctttttgcaaccaatcagatgtttgcacaggagagtgtcctatgtaactctacttcagcctctgattggttgctttccacaaccaatcagaccaattgcaggccaccacttcatttacgtggggtgagcatgaagtggccaatgggaaacctgtagagggtatttggaccccagaagattttctttatctgggcacttgagccgctgctcagcccgctctcacactatggcatgtacttttcattttaaataaatcccttcattccttccttgctttgtttgtgcattttgtccaattctttgatcaagacaccaagaacctgggcaccctccactagtgacacactgataagatcttattatattgggctgataattcacctacacttttaccttctgaatagaaaaggcacttgattagagatgtatatatctaggtgctgggatcaactatgccatttgcaaagtaccttacttcttgagcaagaaggtaaccaaaaggggaatgaataggcaatataatttcttttaaaaatgaattagtaagctcttgtggttacaacaagaggactgttgttttggttctttcacaattttctatagtaaaatttgttagtattaaagtataatgttgatgcctatatttttaaaagatataaaagtagagattttaaaagagaattaaaaaggttttgagggaactgttttagattaagtaagataatgaagagaaacaatgcttaaaatattagaaaaaaagacttatgagaaaagtcagaagtactgaaactgtctagccaaagtagaaacgaaaccaaatgatacctttctcattcatattaattatttgaatgctttggttttgtttttctttattttatattctgttagacgctgtctttcttgtcttcaaccaattcttttctatgtaacattagacagtgtctaataataatacacaaaacaaaaaagttgtaaagaaaccacccacattttctcttcaaaagaaaaaattgtctgagaactctgaatgtctaaagtccttgaataataatgggaaatggaggatggttcatgagtgtttttcagtattagcaaaagactgacaaaagcatgagtttatcaacaggaagtacatatagtcagacttatagactgaaactgttcctaaagctgtgtgtccctgttttagaactatcaccacagtcactgaagccctgggcaattcacagacattgcaaaatcaccacagtccctgaaggccaaagaatgagacacaggagtcttttatcatttcataactcagtgtgcccattcttcctaataggcaggacccagcatctgtggtcctcaatacaaccatttagaaagtcacattgtagtcactccttttgcttgttctggcagggactgaagttggagcacaaaaaatcttgtaaaattcagttcctatatcagggtgtttccccctttttatcatgaagtcacatgtcccatcctgtgtcttaacagtaggtgattattagaagagtagctggcacacagtagatttataataaacaatggaataattagagtgcctagcgcacagtaaatttataataaaaaatatagaataattaatgatgaagaaatgaatggtagatgtagtagaatagaaagatatataggaatcctgagaagtttggcagcacatccaatagaaatgtattgcaaaaagtttatatagtatttacatttcttatagcctcatttaaaaactgagaagaaacaggtgaagtaattttaataatatttatttaactatatgtaaaacaaaaatattatttcttcaacaggtaatcactatatcaattagtattatttattgcattatttattgtaccacctctctaaattccgttgtgaattttacacttccagcaaatctcagcaacacgggatagccactattcaggtgctccaaagccacatgtggctagtggctaccacattacacagcatagctatagaggggtcttagaatattctgactaagtcaggaagggacttttgtcacctccaccaacatcccatgggtcagaacccagttatatggctaaacttaattgcaaaggaaactagaaaatgtaactatagaggaatctttaagaaactattggtcagacaacctaagtgtaatgtgacaggatattatctaaaatcttaatttgaaacaattacatatagttgatataaaatgcataaaatagagaaggatgtactatttttgaagccaggttcaaagtgtatataatgaacactattgaacaaagcaagatttaaaaaaaattgtgaattgaataaaatatgtatagtaaatgtacactctattatgtaaactaaagtatgtttagtataaaaacacccctatactaaaactcctttcaatactccaaagcagtaagaaaaaaaacacaaaatatacatttaccaatcttaatagtctagcttataaactgatatggaattcgttacatgatccctgtttgaacattatgtaagactagcccaggaaatgatatggaaaaaggaatgaaaggtaactttcaacgaagttacatgggagagtgatcaaaagaaaatgtgactttttttccttaactcaacacgtgtacgtgacgcttcaagtatgcaacaatggatctgtgctcaagtcaaatgcacagaccagaaacagaaattggtcagaagacatttcttgttttttcggttttttttttgttttttgtttttgtttttgtttttgtttttgagatggagtctcgctctgtcacccaggctggagtgcagtggcacactcttggctcactgcaacctccgactccctagttcaagcgattctcctgcctcagcctcctgagtagctgggactacaggcacgtgccaccacacccggctaatttttgtatttttagtagaggcggggtttcaccatgttagccaggatggctcaatctcctgacctcgtgatctgcccgcctcagcctcccaaagtgctgagattctgcgttggtcatcaatgtttaaacatgttaaacgtaacatgttacatttaagtaacaatacctacataatcatgtaagtacattcattgccaacttaaaagggagtcttcaaagcagaattgtcagaacttttagcttccctgggccacactgggagaattgtcttgggccacacattaaatacagtaacactaatgatagatgatgagctaaaaaaaataaatctaaaaaatatctcatgatgtttcaagaaagtttacaaatttgtgttgggctgcattcaaagctgtcctgggcctcatgcagcctgtaggctgcgggttggacaagcttgcttcaaagctaacattttttctccaaaattttccctactgctatcgcgatcaatttgtttcctctgaagtgactgattttaactgagatatttttgtttgtttgttttctggttctgcatgtataaatccttcgaatagtgtaaggacactgaatttccagcaacttctgtttcgaaggttcacacttcaaactataacatgttgtgtaattattggaaaagtgtcctaaagcttccattattagcctataaactatagttttggaagagactttgcccaccattttacattactagctgtgagtgcctaacatttagtaagtacccaagaaatatgaatgttagaataaagtcatacatataagaaattctttacattgttcaactactggagaatatgttatatgtagtgattatttttaaaagcattataaaaagcatttcaatttgttcaagcatctcaataagttagttaaaatacacagaaaatgaataaaacaattagaatatatatgtagcatttgtgtgtgtgtgtgtatataaacatatatatgcaaatgtgtgtgtgtgtgtatatatatatataaataggtagagaactttaaagtaattaaaatctgaatgtggttagctcaagtcaggtaaatttgagaaaatctttacaaaagccatttgctcatactactcactctcagattagttgttcatcaggtaaacaatttgctaaataaacatttaaataaaagaaacacattgcataggggaagaaaacataattttacctctaccttgattttttttttttttttttttttttttgacactgggtctcactttgtggcccaggctggagtgtggtaatgcaatcttgtctcactatagcttcaacctcccgggtttgagccatccttccacctcagcctccccggtagcttagctacaggcatgcaccaccatgccgggctaatttattattttttttactttttggagaaatgagggtcttgctatgttgccaaggctggtcttgaatgcttgagctcaagtgatccttcagtctcagcctcccaaagagctgggattacaggtgtgagccaccgcatctagcctctacctttatttcttaactgggactcctataacaaaagagatatcaacaagaaaaaaacaataaagtttactaacatacacacctcatgtatacatgaaagatatataaggaaaaatgaataaatttctctgacaaagaacaatacgttttttgagaagtaacaagacaagggaaaaggaccctgagtctctatgagtggccaatttcaggaaggcaaatatatgggaaactgatggtagataaaggctagttaagaaaatttattatgtagattcctctgatgcagtctccgggctgataaagatctaaagttgtcattggtgatcaaactttgtcctttctgatagagaggagaggatggacacctttgcaaatgtatgtactgttttcaggcaaatagtgggagggcagagaacttatatctgcttcttctgaattgcctttagctcaaaatagtcctgtgtcaaagtggcatattttcatgaacatagagaatggaataatagacattggagacttcaaaaggtgagaggggccgggtgcggtggctcacgcctataaccccagaactttgggaggctgaggcaggcagatcacgaggtcaggagttcgagaccagcctgaccaacatggttaaaccctgtctctactaaaaatacaaaaatcagtcgggcatggtggcgcgtgcctgtaatcccagctattcaggagaccgaggcaggagaattgattgaacccaggaggcggaggttgcagtgagccgagatcgcgccactgcactccagcctgggtgcacagggcgagactccatctcaaaaaaaaaaaaaatggcgggaggctctcatgtaccccagaaatttatacacctacagtgtacccacaaaaattaaaaatacaaaattttttaaaaggtgagattgtggcaggggagtgaggagtgagaaattacctattaggtacaatgtacactattggagtgatggtttcactagaagaccagacatcactactatccaacatatgcatgtaacaaaactacactgtacctcctaaatctataaaaataacaacagaaaaaggcaaatatacatatgctttcttatagattcattaatctgttttatttcagtgaatgaaaacttttgacaatggctaaccttgaaaatatgttattagaacatgtttttctttctccattgtgccctatgagcacaacttgagaaatccagcaataaaatgcaagctagtttttttttttttttgaaacagtcttgctctgtcgcccaaggtggagtgcaatggcactatctcggctcactgcaaccttcacctccagggttcaagcgattctcctgcctcggcctcccaggtagctgggactacaggtgtgtgccaccatgcctggctaattttttatttttggtagaggttttgccatgttggcccggctggtctcgaactcctgacctcaggtgacccgcccgcctctgcctcccaaagtgctgggattacaggcatgagccaccgcggccatcaagcctgctttcttgacatattttgtgacatattttgggatggcatatttcggtctcctacagttggcagggcaatctaaagtactttaatatccttcttcatgatactttcaaaaaatggaatttgatgcctcagaaaacaatactaaaactttcttaaaatattacaatgtgtactatattacttttttaagtaataggacttataaatatttatttttaaaatttgtaaatatttaccatccacctttgattgaacatttttttctcattattttatccaaaaatgtctattgagacctttaaaatttgtattttgtggcaccatctaagacgtgatttatgctccttgtcattatttaatcgtcaaaatgatactttgtctttgcttaaatcagtgtgggtacatcgaacaaggtttgagagctactctgtaggactgagtcattagcctgtaattttacagcggatcaagtactacgttttcattacttggaaagaaaatgaccttgcaattgactcttacatttaacgtttttatctcagctttaccaccattaaatataactgtttgcactgaccacataagaaaccagaaaaatcactgggtcacagtttaatctaattcaatttaaatccgagctagatagctataattggcagtttaccatatcaaaggccagagttaagttacactcaaaattgtgttgatttggaagtaatttgccttaaattttcaagcattgttctgggggtactaaaatgctctttcaagagtttactatatggtacgtaatattttccaagtgttagatgatttatgaagtctacattattatctaaaacaaccaatgttgtaactaccatacaagtctatgaatagaccttatttcacttggcctatctcagggtacaggatcccagccttcttccgtggcaatatgcaggctgttcctcagcaacgatttctagtattgtgtgaaataatcatacttacaatactaacttcttgcttcccaatgccaagaacactcatcttgtttctattgaataaggtgacaggcatgatagaagcagggcagagccaagtcctgacagtaacatttcaagtacagagaaattcatatgagaaaaatggacaatgagggcttgttgtccgtgactttttgttccatgaaaaatatgcctgttagcaaaatcacataactaggaattttagataaagtttctatgtacattatttaaaagagtgctttatacggcatttaagttaaaaagaaagaaaaaacattcacattaaacctaaaagtaactaaaaagtcatagaacagagatgtcatacagatggctagcctttattaagtgtcaagcattgttataatggatttgcatgagttctttaattgcatttatttatcttgttttggtttggtttttgagacaagatctcacttcgtcactcaggttggagtgcagtggagtcattgcggctcattgcagccttgacctccaagccatcctcctacctgaacccccaagtagctgggactacaggtgtcccccaccatgctcagctaatgttcctattttttgtagagatgggggtcccctatgttgcccaggctggtctcagactccatagctcaggtgatctacctgctttagcctctcaaagtgctggcgtgagccacggtgactgaccttatttatttatttttaatgaacaagtaacagttgagtaatttatggtgtacaatgtgatattttaatctatgaatatattacagaaacattcaatcaagctaattaacatatctatcacctcactaacttatgttttgtggtcagaatgttgtctactcttggtgggaatgtaaattagtatggtcattttggaaaataatatggagattcctcaaaaacctaaaaatggaattaccatatgatccaactttcctacttctggatatatatccaaaggtattttaattgatttgtcaaagatatatgtgcactctcagttaattcttaaagcaacgtactgagatagacattattagtatcctcattttacatatgacagaaccaaagcagagaatagttaaataacttgttcaaggctaaacggagaaagaatcaggattctttttaatattttcaagattcccaagttcaaatgattaaacaatctattttttttttttttttaaattgggggcttccaccttttttatatttgttgttagtgggatttaggacatatcatccccaaatatggcaccttggcatttcgggaaacagcggaagtgagaaagtctctgaccttctgccaccattttcctctgaagcagatcagaaaagaattatctggccttgctctgaagtaggccataagacccctcatgtgtcccatacctaaaggaaaggaatgtcacactgggacacagagaagactgaacaaacaggctttgctacattcccccccaccccaactttattaccattagattacacccttttgttctccaatcatacttctgccaggttgtccactcttcatcaaatttagcataaaaatacacaggtctcccctttttctttaggtattcatttctgaatgctcctgtgtcctggtatcatttgtaaaatttatattaaatacatttgtatgcttttctcttgttaacctttcttttgctataggggtctcagctatgaaccttgtgataggcgaggaaatcaattttttctcccctacattgttcacaatccaatttaagagaaaaagtgagcactcttgatgatccagtaccccccaaaacacacagacacatgcagaaataaaacaaaagttttataaaaggtggcatttttagtatatgtagccacactttaataattttatttcattcttttctatttgtttttttttttcctttttttgagatggagtctctgttgctcaggctggagtgcagtggcatgatatcagctcactgcaacctctgcctcctgggttcaagcaattctcctgccacagcctcccaagtagctgggactacaggcacacaccaccatgcctggctaattattgtattttagtagagacggggtttcaccgtgttgcccaggctggtcttgaactcctgaggtcaggcagtccgcccgcctcagcctcccaaagtgctaggattacaggcatgagcgaccgcaccagccttctatttgattttttacattaatggcagttatgacacataaacgggttgtacagctcacaaatgtcttgacctatagcttgaagagcatttgtctaaatgacttgctcaaactacttactcacaaatccgggttctaaagttaggttttttggtttaaaaactgtaggctttttcctcttggttttataattgtgtcagtccaaaaattcttcatttcctaacttttctccatattagctataaatcagaatagttgggaactaaatgggagctttgccaaaggggcaatccccaactacaatgcgttggtctaatattcagtaaaatacattgattttagtaaaattcactgcatattttgcattttactcaaattcaatataaaatagacagtttttttttttttttttttttgagacagagcttggcttttgttgcccaggctggagtgcaatggcgtggtcttggctcactgcaacctctgcctcctgggttcaagcgattgtccttcctcagcctcccaagtagttgggattacaggcacctgccaccatgcccagctaatttttgtattttagtagagacggggtttcaccatgttgaccaggctggtcttgaactcatgacctcaggtgatccgcccccatcggcctcccaaaatactgagattaccccacctggccaacagtctgttcttaaagaaagaaaattaaaataaatataattactagattcagtgtacattttacttttgtgagtatcattcaggaattcttacctcagaaaacctggaaaaggcaagttatttagaaatatgaagaaatcagggtgttttattcttaatgaaagcatgcatcttaatttatctttagaaatgactgggggaagttgattatacaatcaaaatgattaaaattaggcatgtagactttagtgcaagcaaatctgggccactcatttccaggtacatgaggaaatgtactagcacttcttttattactatagctttgaaggcagcgtgttgtcttacttcccattgtttggatttttaaactgataattaaattcatttgcatcactgctgcttggattacaaatacttaaaacaattagttttctgtcagatcacagatctacatcaaatagatgttactttttaaagaataagccctcaccaattagaatgattcaaaagcttttgattgttttctccaaattgttaagtatgcatttgtctttaatgtaaataaatagacttaatggcataaaaagccattctgaattttaaatgaatgacaaaatgtaaatcatgttctggcataatagttttgccaaagtttcaagaaaagaaataggagcattcacaataagcaattgcaagctgtgaaatggcatattaaaacagaggattaagttatttttctagttagtttttggggaaaaaatctccagtcttgcagaaatggctaaataattgcatttggtatggaggctacttttggtcaaaattatgttaataaatatctgagttcctcacattaaagtgaagcaagaatctgtggcatttttttaagtcataaaacatttgtatgttggcttttagatagtaacaagatggcatccatttatctgtatgcttctgcgcatacaaccttatatgacatatgtaccaataaaaaaagtatacatgtattagtaattaaattctagacttgtgctgtccaatttggtagccattagacaatggcaaaaaattattttgaatttaaattagtgaaagtaaaagaaactatgttgttcctccattttgctagctacatttgaagtgctcagtagtcacatggttttagtggccatcgtgttatgtagtgcatgtatagaacattttttgttttttatcaccaccaaaaattctaatggacaatgctggtttagctcttcagtattgcaaactttagcctttaaaagctatttgcaattatttagcgtgtattgtttatgctccaaaatactttcatctcaatgtagaaagaaaacgattgcacttttgaatataagagaaatcaaatccttgatttttttctacataaaaacgtggaatttaaactgaattatttaacaaaaatcaaagtaccttagaaataacctgaaaagaaaaacaaattttagataatatatataattttgaagtagaagaaaactaagataaaacgtactgcatttgtatacttttatagttttctaattattattataattggaaaaaatgaattttaacaaattaggtataattatcactgtggtaagcagtctccagaatggtcccaaattaaggttgtctgattacggaataccatgttcttttaagtccagtaatcccaaccttttctaggataaagcttggtatatggaatcaagatatgtattcttgttattcttctgttaccattactgctgtgggtttcaagaacaggcacatacagtttctccttgtgtgacacaaaccttgtgtgaatactttttggtacgctttcaaactggggcagcactagatgaatgccttttccctaggtatgcctttcagtaaactctccaggtgagaggggtgtagtaagtactgctttacatggatctaagtgacatgatttgatcacagttcaggtggttgtagttatgaaccatttcatgttaaattaaggtttaggggtttattttctaaaataatgctacttacagtgacagcatagcatagaatctacaagttctaaagcaactcaataacttctcttaaatggcccttattattttggattagcattttggatgacaactaactccactccctctcttgaagggaaagagatttggtagaaataattgaatgaatcctggattaatctagaatatgattttatcaatgactgatgaattacactgcactcagttgataacggtgtcttcttctcttagaaatgttgagtttgttcctattattatttcaggagacaaagctttttaaaagagttggtcaactgtagctaggcatgaaagcatggtctctaagaagacacttataattccctaagtatttgattaaaaggaaaacaagtacctcaaaaactcttaagtttatgttataggcaaagaagtccccaaacaatttagtcaacactctgaaataaactcttaagagtggtgattttcacttggcattttggagattccatgtgtggcaatgtgctcctcaatcaaggagttacatttctatgtgcagtaacattgcagttgcacaattaatacaaaaacaaacatatattaatcaatgacaggttttctcattttcatacagagttatgaaacctttaggctaaggaacagaatagtgagaaattagacaactattaataataggattaattagattctggccctacagctaagaaaatggagtgacaatcagaataacaccaaagttttgcaagttgtccaagtgacaaaatacaactaattaatactaataaactaaagtcaaattggactctatttacacaaagtactttttatatacaggcaaaaatttaagtagaaaaattatggcctcccagaactaataccaaaaatttaatggtaagaaaatgaacgtattcatttaatatataaccacatcatttgaaaatattgagctctcattgtaaagacatgacattttctctaaaattaatatattccataaaaatagtttttaaaagagaaaggctttgtcttcattcttttcgtgtgaaggtcaaatatcttagattggaatttaactgcaggaattatgcttctgttcttactttagcaacactaacgatgacattttctgaagtacatattgttaacaccatcatgatgaaagcaaatcatttttctacacttactttgatgctaatcagagcagtcatttaagttgctacatgactctgagacagaaatttcaaaatgaaattgaccaccgattcccagacaaaaccagaatagtggtgtcagatgagaagggttttgcagtgttttgtcacatttcattttgatttttacttttttctctgtttgacatatgttctgaactagagtgccataaagttttatcaccataagtttgaaatgaccacattactcatgagctacagagtcacaagtgagtttttagcttctttcaaagctgtagaaataaaactttatagtaccctaccctggtatatgttgttttatgtgacacattttgttccactttattcttttcttttatttcccttcattattttctttttgaattatagcagaatttgtattaaatttttcctaatacacaacagtttaagctacattttataatatcttatgtatttttttcatacagattatctttgacctgtaatgcccatctcttaaagaaattttagatggtcattataaacaaggttcattgtgaaatatatttctgttgaaacactgattttattacaaaaaggtaatgtttgatttccatgagaaccaaaactattggttgagatatgaaagatgaacatttgcttccctttacacaattgattaaaattcttaatgcatacatagtcacactacacaattagtgtagtacatacatatccgtataacttgagtcttccatgtatatgttatgcaatagaacttctacaaagacatcaatatctcatgctgaaactatccaaactataaaatgattttaggattagcttatcccaaagggaaattgtgagcaatgtggctggcctgacagcctgaagtgatatgctcagagtggatctgataggcagccattcatttcaagctcaggaagcaaacttattattttgtcatacacggtcgtttttccattgaagacattaagacggtaaagaaagtcctcagagtctatggaaaggatcaccagactttcattttatctccagatcttgaactggagcttttgaagattccattttagtgatttctggaaggctgctaatcttaatgaataaagtcagaaacacatgtgtgtggctgattcagattccagaaagaattttggttgctatcatgattatttttaaggcataagtgattaacgctgagatatactgcttttcctatttgtggattaaatttcttctatcggagaagttctaattgaaatgtctccattcaatgtggttgtgcacacacacaagtacacccatgaatgatattttacatatgtaaaaaaagaaaaccgatattaagtaacttctacttttcattatgagacatgctgtgtgtgattttatatatatatatacacatatatatgtatatatgattttcctgtgttttgttaatcattttttatcattttataatttttaccattttcatcattttttattgtgtggctgatatatactagatattactcactcagggaggatacaccctcatctgggcactcttttatacaagttatggcttttgttttaaataattcatctaagtttaatgaaagaaataagtgactgctttatcctagagaagcagcaaagagattttgttcacctgtgcctttagagactacatgacagcctctacaagtagcagggtagaatcaggttgattataaaagccttcatttcatgctaaatggaaaggagaaaagaaagaattttctcctttaattagaatgtggcagtttaatgacagaggcactattgttgtgggttaacatggaatgaaatcaattaaataggactatgtatacttaggtgtctgtaggaatcaccaaaaatgtaactctccaacagtttgctgaatctgcctctgttttgtctggctgctatacttggtatgtgggccatctggctcctggattccagtaaggtttgcatattcacacatcaatcagaagtggtgtagggcctattaggaagcaccagccagttaggtgacatgccaggactgcaaagcactcaagcaggaatgccaagtggggagcttctgctgaagctgacgctgacacgggcattggaggcaccttttgatccgtctagctttactgttgatgtcacagtcctgctagatcaggcatagggatgtcaggtcacgtaaggcctcatttatgtcattggttttgcctggataattcaaatggagcaaaaataaaagtgatcttgatccttaggtcccatgacttttgatagtagaaggatcattgatctgaaattgtcttgcattcctgactagtagacagaaagatatcagaagcaactttgtctattctgtttctagaactatattgtgggtactagtttttcacagtagtactagacatttcagaaacagctaccgaataatctttccaaataaagggaaaggttgtaataaaatgcattcccattccctatgtcttctcaaacagttcactgaaacttaaagggatgagcacactttacaagaaatgcaaataaccttttagttcactgaaataagataaacaacacatgtgtgtatttttaattggaagctctatcattcagttccttgaactaacagctactatacttttcttttgatgtatgcttcacagatatccattgcaagttttagattgtttgcttcaatgtagataagacaaattaactgaaaacttaaaaagcacctagaggattggttattttaatgttttttagacctctggatgctttgatcccatacagaataggatgaaattccactataatggcattgttttaaaatttgaattggccgtaatgtgttgtgtgtgcacacatttatctagctatgaacacaattaatactcactgagagagctctttaaaatgatgacataatttttttctttgaaaagttatttcttacgccctaaatttctaaagtcaccaaaaaaaggtaattttctatatgtaagacttatttatagtaactaaatttctaagtaactgatatctcctaaacagaaatgtctaataacttacttctagatcagctttaacaatggttttgatttatctaacttagtgcagtaatacaaatattagtagtaaaataatacaagtttaactaacttggtataataataggaataatataattgctcatgtttgatgtatgctaactacttggcaccattaagtacatcacatgtattatttcacttttctcattaaaatagcagtgtgatgctattatctccattttacagagagggaaagtgaggcatggagagaagtcgcaatttagaaaagtaataagtataatacttattttaattttaaattattctttgctagaggaaagatgcatgttccttggacatcttctatactttaataatattatttctatgtttctagcaacccccacaatgaaaagcaaatacacgatgcctttgggggacaaagcagttctgtagtcaggcccacacatgaagtgttttacctttataggtttcaacaattaattggaataagctattttttctgttttggcatctgtctacttggcaaggcccccaactgtggtgttggcagctgcatgacagcgactgcctctggtttttccacagcaactggctgaaactcgcctccctgggctgtcctattatgttgaaaattattttctttgactcaaatcagaagagtgtaatagaaattgtgaaaattcctgacatcttcccaaagatgtttttgaaataggttaaggttctccgggagtaaacttggattctaaatatgattttttttttctgacagatgtatgcatgtgttatggtaggtattcagaaatgaatgctctcatttgtaaaataaaataaaataatcccaaactcttaactatagcaatttgtggttttaatcgttttcccttgtaaatggaaacttggtaagttttagagtgcattgtacatgataaaatacatcttatgtctaaaatcttagaaaatattatcttgcattggggaaaacatcataatagtgcatatgtgattcattttatgtaaagtcctaaaattatctaaattaaaatatctatattctatagctgtgcatgtgtgtatgcacacacaagaatatacacatctgcattttatatagatacaagtatattgaaaggatgatacattcttatacagatgtagagcttaggatttctttatcaatataagatagaaactgcgaaagcatgaaaatgaaattaagcatacttcctttattcacttatcacccgttttcagaattagttgccctatgggtaggtaccttttaaattatattgtacatctttcaattaaatatcgggaggttgaaaattaagtgacaattctaatatttctagtggaagacctgaagctgcactattaaaaagctagtaaatggaaggggaaggatatttctttatccatggagttaattacacaagcagtacactatgtaagtgctaggagaaaaggtgatacaaacactacttaaaaggtttccagcgagaagcagctctgaacaaagtagatttaaagtgttacctccttactcctacaaattctaatgggaatcaattatgttccatgagtaataataataattaatatttatggaagtgcttactatatgcttggctctgaaataagggcttcacatattatagcacataactatcctaagtagaagatactatttttacttccctttttatagatagggaaagtaaaacacagaggtgggccgggcacggtggctcactcctacaatcccagcactttgggcggccaaagcgggtggatcacctgaggtcaagagtttgagaccagcctggccaacatgacaaaaccctgtctctactaaaaatacaaaaattagccgggtgtggtggtgggtgcctgtaatcccagctacttgggaggctgaggcaggagaatcgcttgaacctgggaggcggaagttgcagtgagccgagatggcgccattgcgctccagcctggggaacaggaaggaaactccatctcaaataagtaaataaataaatagcacagaggttaaataactctcctacactcacacactccatgtgtctctggtgatcacttggtaccacttcttttcttgcatgtctcacctctcttataaacacattaccaattttaaatgggtgttatgaactatgtgtattaattatggctgagaaccaccatttttaataacatggaattttctttagctggcagggaaggaatgcttccagtttaaaaaaaacggtaaaggacatagctttaaacagaaaagacgctttgaagataagttcatgtccataaagtccattcaaataacttagtaaattgctgataaggtcatatcatgtagcattttttaaaaataagattgctgaaagttcagcttgctctgagtaaacacagagcaagatgattctcaattatatagtgaataaaatcaataagaacatctagtgaaatccaaacagaaaataaaaaaatcaaaattgacttttaaaaaaattgacattttatggagataattgtagatacatatacagttaataagaaataatacggatatcctatgtacactttaccattttttccctaaagttaatattttgcaaaactataatataatatcacagccagaatattgacattactacaattcagcaattttattcagtttctctcggtgttcctatatgtgtgtgtgtgtgtgtgtgtgtgtgtgtgtgtgtgtgtgtgtgtgtatttagttctgtacagtttcatcacatgtgcaggtgtaggggaattggatatcacctccaatcccccttttagttcttagtaggctcttcagttggatctagaaaccaaatcgacatcaggcagaaaacaaaagaaaagaatacaaattgtattacttatacatgtacgtggagatcatcacaagaaagtgaagcctgaagaagtagtcaaagcaagatgcttttaatgatgaatgatgaatttgatgaatttggaaagcaatgacaggataaagagaatctggctagggacagtaaattttctctaggggagtcactaggagatagatagtgggtataaaactagtgaaagataagggttacttcagtaaatatatttattcaggtccattgaagcctccaattctaagtctctggtaataagggctattttctcactctggtcctgtgagggtgcccctcccagaggaatctttatggtttgctgcatgtaggaagagacaggtgagctaactctttctgaaactacaatttctccaaagtttccaactgaaaatagccaacataccaatctggcatatttggggatggaacatcctttactccttcacaggtatctgtggatgagagctgaagcaggcccaccaggaacagagagtgtttccccttactgttggcaattctctggattgcatctacccatcctgtcctagaaagtgtcaggagaacctgatgttgtctcagggaatcctcttagatgtggagagataagcctttctaggctgctttcgactgctggttgtgggtctcgaaatggtgagtctgggtcacttgcttctattaagtgaaaagatgtaagtcactcaacttctgctccagacccagtaaaccaaaactccgtcgtcttcttctgactaccttcagagttatcttgggtttattcctgcattattaccagcatttgttgctgttttagtgggaagaggaagggaaaaatgggtcgaagttatcttacccttaccagaagttcctaaatagactttttcatgagaaagaatatttttaaaaaactgtttatattataaatattcttggtagtttttttgctgttacatattttttaaaaatccatagtgcagatataataaaaactattgcaggtatttaaattaacagaactagttgaattcctacaacgtgtcatgtacagtgctaggttggttgatctgtctgtgcttctgctttacttggaatggatgagcaaaggcttatactaatttgcacttagtattataatgaggtgtgagaaaccaattttcatattcaagtgtctataaaaagtgactatttttcaacagttagctcctttaattataaaatcagtttttattaaaggcagttgatgctttgtgtgttgttgctagggtgacatatattatagaaacatacagtttatctttccagtaagagggaatacagtctctatcttaccgttaatactttaattagagaatgatcgacagaaaaatcttttttctcttcatgagatttgaaaaatgcatatcttctttatctgcatttaatcaaccctgggttcattaggatttgttgtgttggcacctgagaacatcttagaaattattaaataattcattttctgctttttttctttattttttatttccagcagaggcttgtattaaggagattctcttttgacatacccccacatacattcacactaatatatatgcactattttcaactgacatgttttagagttattgagatattaattttataggatactatcacattttatagctcttagtaaatagtatggtatttcaaaacataatttagttatagtaatagaaataatccatcatatttgttgtatttataaaatgtcttcaaaaatatcatataaatgatatctgaaattttgtcctagtcttgcaaatgctaggggattaatattaataaggttgttgtcaatataaatttctagtgagatgctcattaactggaaatccagtgctagagagacatttcagaatacctaaaccttatttagagacaaataaacatactagttaatatggctattgctatgaaccgcataaaattgaaatttgcccgaactcattcagctaagcatgctaacctcggctttggaaaagattgaatggcctatcatcagtcaatcttggtactagagttaaaagaagaggcaagtaatatggacagcacaaggaaaatgacagaaatagcggcttgtgatgataattagcaagaagtttgaataagcaaactctaaagaatattgaaaatgagacaaaaactgttaatgtatatgcaattaaatctttggaccctccttgcttgttgtttcaaatatccaattgtggagagaactacgctagggtaataatattgcccgttttccctgtccctccatgtactccaattaagaaagcagaaatgaaccatctaccctgatttttggaggaggaattgagtaggtatggcttcatgctctttaaattggggttaagcccccatgatataaattatatagggaatgcttcttcttccatttaatgcttactaatggatgtcactaggcaaattattagcaaacatacataataagaagacttaatgctatgttcgctgataacagctttatcattagtaaaggagatattttcatctctattcgtctgactcctatatgtgcggcttaattgattacgaacctaggtggggaatagatttaataattttctcaaactccatctataagtaatatgaagacatgataaatttttaagcagaaaaatgaaatgaaaaatattatgattcggaaaatttgtttccttgtactatgaaggatacttgggagcaggttggagaagagggtgaaggaaccgtttgggggacgcgtcagtaaaactggtggtagagactaggctgaaggatgatagtgggaatggaaaagtgaagacatttgaagggaagaagacattgtgtcggagttctaacgatgttcatttgtgcataaaacttgcatttgtctatcttattgtactttatatattcttcctaataccctgtactccattttactcctttttttttttttttttttttttttgagacagagtctggctctgtcgcccaagcaggagtggtgcagtggcgcgatctcggttcactgcaacctccgcctcctgggttcaagcattcctcgcgcctcagcctcccgagtagctgggattacaggcgcctgctactacaccagcctaatttttctgtttttagtagagacggagtttcaccacgttggccaggctggtctcaaactcctgacctcaagtgatctgcccgcctcggcctcccaaagtgctgggattacaggcgtgaaccacctcgcctggcccctgtaccccattttcaatatggcaaatggaataaatgtttttacaacatttatttgactgttgtttataactcttcaatagctgtccattactgtaaagtttatgccacaacctatagggctctaccttttaacagctatctctttctgattttccacttctctccaacctccctccctaaattacggtgatactgattttcttttaaaatacaggactactatcagcctcctttttcatcttttaggccacaacttaatgtttcttcctcagagaaatttctaaaggacccaaacccacaatagcttctatatgagactacttctcccattatatatcttccaggtatcctgtaatctcctttacaacagccagcagaattgaagtacactatttgtcaaccaaaggtgtgaagcttcttcttactcctggtgtttgtggttttattgactcttctttgttttctttaccagtgagatcccatctacatctttcagtattttcaccagtatcttggtcttttgcttgcttgctttcttgttttctaggttgattataattttattcctctaaacacatgaataccttccgtcattccaatggaattttggacaaaagggaaaaagttataagtgccaatttggttgccatgaaccaaaacagaaaattaaatacaattgcctagataatcaggcccaatttgtattacctagtatgaaaaacactttggtaacaacagtaggtcatgttaaactaattaatttctaggaacattgataaattaaacattggttactctccagagtaactctaagcccagaaaataagtgacttgtacatccatcatctgattcaggttcaaagagagtttctttattttggcaaagccaactttactgaaatgagatgagaagatttctgttgccaatttataatggagattaaaaataagaccccattgtcagagttggagatcatatgttggtaattgtggttttgtacaaaattaagaattgatccctaagaacttgtaaattataaagactttgtttagctcagtcacatttgcctaatctaagatttctgtctaggagaaataattttctagatggagtcaactagtacacctagtttaagtcttctttatgtgagattgtgtttaaaacagtgactcttttggccatagttacaatgagttcttcaagggttgtgtatttgcagactatcagtggaaagcacttgaatggcaatagttggaaattttgaagcaaaggaaataaaattgttacttgaaaccttgtaaaaagatcatacggccgggcgcagtgtctcatgcctgtaatcccagcactttgggaggcccagacaggtggatcatttgaggtcaggagttggagaccaacctggccaacatggtgaaacccgtctctactaaaaatataaaaattagttcagtgtaatggcgcacgcctgtaatcccagctactcaggaggctgaggtgggggaatcacttgagcctgggaggcggaggttgcatcgagccgagattgcaccactgcactccaatctgggtgagagagtgagaccctgtctcaaaaaaaaagataaatttttaaaaatccatgcaaagagcttgctattttgctattttagggagggagcatgagcttcatactcacttggaatttcctgagataaaggcagaaatagaattggaaaatatttaatataaatctgaaaagataaggcatttctcttagaagaagtttctaagcaaggcagctatatagcaaagggtgaggtatatatccctggctgcctcttagcacagggaactggcaccacggggcctacactggcccaagagttcttcaaagataattgtgttcccacaacttttctctgtgtagtaaactcttcctgccctgtagcagtccgcccagttcatgaaaaccatgggatttgacccactgaagaagacttttctcttaaagtttttcctgtttatccaggttttacccagtaaaggtcagctataactggtaatagttttgtcaatgtttccataccttgggacaaagttccttatttgctcggtatttcctctcaagttttacttggcattttgaaatttgaaaaaaattctatgtttttcctggctgtgaaaatgtattttttctttagtatttgatattcaatttataaaataagacttaaagcagctagatatttgcccatcgttatgtttagtggaatgaagaactaatcagctactactagtcttgttccaattaacattctattcctccatttccttcccacactgatatatgtacatatatagatatcagtgtgatatatatatatatcacacatacatatgctcatatatacatatatatcttatataagtctttgacctttctaagggtcaaacaccatgtttttcacaatctaggcaagctgctacaaggaaggaagagtctattatacacagaaaagctgcaggagcacaattatctttgacaatacaccttatattggtattttattttttttctgaaattactctgggttgagtcttatatttagtttctaattgtgaaggaaagccctgtaatgacctggtgatccatcttctttagaaccaagtcggccacagtcctaaaataaacatctgaaggcataggaacatttacagatgaaaatcataatttaatcaattgggtgtattatcttattttctaaatatgtatacattatttctttttttcttttttgtgagatggagtcttgctctgtcactcaggctggagtgcagtggcatgatctcggctcaatgcaacctccgcctcctgggttcaagcgattctcctgtctcaacctcctgagcagctgggactataggggtgtgccaccatgcccggttaatttttgtatttttattgtaacagtggagatggggttttgccacgttggccaggctggtctcaaactcctgacctcaagcgatccgccccaccttggactcccaatgtgttgggattacaggtgtgagccaccacgccaggctaccgtgtttcttttaaaaactttttttcttctatgtaccgtataggttttaaccctgtaagactgaacaccctcttttgtaagacatattttgtaatactcccattactatcctcaaagagaatttaccaaaaatgtaacttacatatatatataaaattctaaaacaattaccttgtaaaaaataaatcaaaggacaataatgaattaaaaataatggatatatttatcatcaataattaattattcaatatgaaaataagaaaggtacatactgctctagataaatgtagtacctgtacctaaaaccacagaagtagacagctcgaaatgctgacgtatgcaggtgagtggtatgaatgattaaaatgccatgaacagcatattttaaagtaatgggatttttctgtatgattaataacatttggtaaagttctgaataaaataagtgcacattttccctttgatttattgtgggatagtttcattcttggaaaatgcagtgcatataaagactttgtatttatatgtaaaattgagctaggttctatatattcacatacttataaacaggctgtcccctacttttcaaaagctgaataggacatgaaacaattactcattttcctggactttcctgcgtgttactggatgtctggcgtccttagagcacctttccatccgttatggggacaatcacagtgctttcacgtttcttaaatgtacccagggtatggtggtgtgcccagttgagaggaactgcaagtgagggttgtatttttttttttttgagacgagtctcgttctattaccaaagctggagtgcagaggcgcgatctcaattcactgcaacctccgcctcccagcttcaagcgattctcctgcctcagcctcccgagtagctgggattacaggcttgcgccaccacacccagctaatttttgtatttttagtagagatggggtttcaccatgttggccagactggtcacaaacttctgacctcaaatgatccacctacctcggcctcccaaagtgctaggattacaagcatgagccaccgtgccaggccagggattgcatttttgcatcgaagtagcagaaactagaaccagaggattttaactttctcatatgatggaatctgaaggaatggagtctaaagcaagaaactggccctgtgatggcatgaaaatcccaggcccctttgatcttcttgctcttttacaccttactatcattctcatgcttgtcaactcttggttgcaagatgatggtttcaacatctccagcctcaagtcttacatttcagagcagaaagatgaaaaaggaagcaagaagaaggaagaggcagcatgtacatcaggaaaacaaaactatcccagaaatccctagctgtcgtcctctcagatgccaaaaggccatgactgggtgccagagatgcttgaaatagagctctttgttcttgcttgacaccttgctacttctaaacaaaatcacgattttgttgttgagagaaaaaggactcctccctatctacttgtcctgagactgcttcagcctctcagcttcctagaccctcatgcagttgatttccaattcttccaggagctggcttactgtctactttttcagggtttcaaaaaaaaaaaaaaaaaaaaaaagcattttttaaagtttaaaaagcaaaatgtggagtgaatattttttggttactatgctttttaaatttttagaatttgtttttactgtgggttggctgttaatagtccatcaagacaactatttctttgctgggtttattggatattgggcaagcaaacaagcaaatagcagtatctgccactggatgtaatcaggaagaaattttcagaaaaaaaaaatgatgcttcaaggtctagataagcagattttccactggttcctgattattctaaataaaatgtttagtcagtggttgtgtaagtttcaaggatgttatagatggctcttgaaaacaataacacattaacctaatattttcagtactcctttttctagcttcatttatcctctcccatgcctgtaaacatgttactttgttaaccaaataaagtcattaatacatgagaccattttgccaaaagtaaacttaaaattaggaggaattggtctttcagaaggcaagaagagaccaagatgaaaggaagtcatttttgtgaaccatatgttttgacccagaagaactatttcacagcctttctcctggtagcaaacaatgagggaaacagtttcttaccatctgcacaataaaacttgttgaatcactcgggaattgggattattgctactgtttgtttgttgttaagccttaaatttaaaaaaagacaggatatataagcagggttggttctaatactgaaataaaacaaaaatgaacaaacccagagaaatctgcttccaaaaagccacagcacaacaaaaagaggtgtaaacatcagaagacctcaagggaaaaatacgtttatttagaaatgggatatcctggggattttgttacagcagctttattaagatattattcacatactgtaaaattcactctctagaagtgtacaattcagtgttttttcagtatgttcacagagctatgcaactatcatcactatctagttgcagaatactttcatcatccccaaaagaaactgtatgcccattagcagtcactccccattcctctctccctctagcctctggcaaccgctactctgtgttgtgtctctatagatctgcctattttggacatttcatataaatggaatcatactatatgtggcctctagtgtctgtaatctttcattttgcataatgtttttaaggtccattcatattgtagaatgtatcagtctttcattccttttatttgctaaataaaatttcattgtatggatataccaaattttgtttgtccatttatcaccagtttacgggtattcgtaaggcttttttttcccactttttgcttccagtagactttttgtatgtcacaaatggccatatgtttctttatcccataatcagaataaaaattatcattcttttagtggacgtgcctttttttaatcaaggcacagaaataaaaaagtgagttgtattttctcattaagaaaacattttggggtgtgcatgttttcagttgtttggaaatatgtagacatattggcagggtatcccacttacttttgctgtgtataaaatcaccctgatacttagcagtttaaaacaattactttattatgccgtggatgctgtgagtaataaattcagataggacacagcagggatgttctgtttatgctctgcaatatctatagcctcatctgtcaagacttgaaagctaagttggactcaatggctggagggtggaattctgaaggcctacatgtgaacttgctatgttgtttggcttcttcctagcatggtggctttacgatactcacacattttctatggtaactcagggttccaagcaaacgctgttctagcaaacaaggtagtagtcatatggtcttttatgaccctgccatggagggcacaaaacattactcttgccatcctctatctgttgaagtagttacaaactcacccagattgaagaggaaaggacatagaccctacctttccatttgccaatgagttttgggaccatattttaaaaccattgtgccataaagggcatgttttatgacaggtgaagctttacgtcttaaaagtatataattacaaatgattaaatttaaaatcacgagaataaaccattgcattcatctaccatcttgccactaaatcagaatcagtaaaacaaggtcaaattgactagaagccacatatagttgacatttggaagaatttgacagaaatatggctcaattggagttactgaatttaaaccaaaacgtttggcaccaagaatcatgggagcccagactaaagaggaaacatacattatatagctcttattatctaatggtgaaaatcctatcaaatctccacaaaggtggtgaactctggtcttccatggcatcctagacaaactttatttacaggcatgtatggtatataaaataggcatagataataaatataataatccagaacaatgataaaacagctactatgtcaaggtaccatcctaacctcacttataatcaggcattaaattctcataagaatcctatgaattagacaccattattatccatatttaacatatggaaagaaactaaagtacggagatgctaatgaacttacccatcgtcccactaataaatgttaaagtcaggatttgaacctagatgctcaggctccaaagcctatgctcaaaactcttgctatgtgaatactggcatattactgaataaaatagccccagttttgtttttaaataaaaaatgttgatcaatttttttcaataaaatattgtttcatcacaataagacctacttattttcctcctgagcagtttttagtgacatcaataacaatttttttaggctgggcacagtggctcatgcctgtaatcccagcactttaggaggccaaggtgggcagatcacttgagctcaggagtttgaggcaagccagggtaacatggcaaaacctcacctctataaaaaaaatacaaaaattaacagagcgtcgtggtgcatgcctgtattcccagctacttgggaggctgaggtaggaggatctcttgagcccgggaggtcaaggctgcagtgagccatcattgcaccatcgcactccagcctgggctacagagcaagaccctatcttaaaaaaaaccaaaaaaattataagcgagtcatacaagttcttcacagcttttcattatggtaaaccttgattaaaagccaaggttataaatgtaatttttgctaagtgcggatgtattgtatctgtagcaaactgtaattcaggcccctgaatgtaacatcctagctctcattccttttgctgtcagatttccctatagataacgtctacatctgctaccttatctactcgcaaatatttatgattttcttccatgaaatttacttttctcccctgaacctgtaagccaaatcaagtgaccttttgtgaatctcaaacctctgtgaattttaggtagatttaatattcttggccaccactttctattcagtcaaattcaagaattctataaagttaaatatatatggatgtgtgcacacatatatatatatgtgtgtgtctctaggtcatgaatcttttaatactatagaacatagaacatagaaaattataagagaaattaaaatatattgtcaatttaaaagcataccgaaaacatgttatatgagaatggaataatacaaattattggtatggggagaagaatcatgaatagtttcatgaggaatgtggcatgtgtaacaggcattaaatatgattaagaactaacactgagtatatacaagttagctgtatcaataaaaatgtaaatcattcagcaataaactataaagttatttttactccataagggtttttttccctgaaattttcggcccaaagtgactgttttttcttcacatgccacttatatagtgtgaccaagtatttagttaaaaaaattattctccagtcaaatcatttgttgtacacttcttggagctgtggcttgcttgtgtttttattgattaaaaaatacagcacaatcttgcacctaataaaaacctaacaaactggctgagtgcggtggctcacgcttgtaatcccagcactttgggaggccaaggcaagcggatgactggaagtcaagagttcaagaccagcctggccaacatggtgaaaccccatctctactaaaaatacaaaaattagcctgacctggtggcaggcatctgtaatcccagctactcaggaggctgaggcaggagaatcacttgaacccgggaggcagaggttgccatgagccgaaattgcgccactgcactccagcctgggcaacaagagtgaacctctgtctcaaaaaggaaaaaacaacaacaataacagaagaaacccagtaaataataggaaaaaagtgaatatagaaaagtaatagaaaatggttgcctttgtgaggttagatgtaaccaaaatattttagcaattgtttagaacaaatagattaaatgaaaaatatttccattaatattttaaactgttaaattctgtctaatttcacatggtagatacacattcattaagacttttcagtgttaagactaaataaagaaaaagaaaattcttcttattgtgccttattcagaatccactgaatttcgttattatttttattatcattatcattatcattatcagtattatttgagatggagtctcgctctgtcacccaggctggagtgcagtggcgccatcttggctcactgcaacctccgcctcccgggttcaagcgattctcctgcctcagcctcctggggagctaggattacaggtgtgcgccaccatgtccagctaatttttgtatttttagtatcttatttttgtgggtacacaatagatatatatatttatggggtacatgagatgttttgatacagacatgcaatgtgaaataatcacatcatggagaatgggatatacacccctcaagcatttatccttcatgttacaagcaatccaattacactcttttagttatttttaaatttacaattaagttattattgactatacttaccctgttgtgctatcaaataggtcttattctttagcaaagcatatttgtaaagagtttggagtttctctttgctttacacactgtaaaaaaaaatgtcaaacaaggttatccaaagagtagtaggagaatgagcattgagatcataagtgtctcatctgatcaaagttattcaagaatgaatgcattttggaggcaagagttgaggaccatcgccatcattgactatggagtaacacaagcccagactcttgagattaatttggcattatctttcaaaattaaaagtataattacatatttacatagcaattctacttcaaggagtttgcccttcatttatgttttcacatgagtaagggtttagatggacatgggttttctttgtagctaggtaatagtaaaataggtaatctaaatggacatagcttggtggtagtccatgcctgtgccctttatactacagttttaaacaagagatgaatttatataaacagatgttgaaatgtgatcgttatgtagtattaattgcacaaaagtagaacatatatatgtgcatatgtatgcatacatacatgtacatacatatgtgcatatgtgttctagtttattatatatatgtcaaattgttctatttgtatgaaaacactataaatacatacataataaataaacaaatatgcgtttgtgccaaaaagcacagaacatttctgtttagtctcataccactcattttatagctttatagataggaagaaggtagactttgatggtacttgaatttttatctatgtatctgggcaagtattttatctatgtatgtggtagcatattttatctatgtatgtggtacatacatgttttatgtatatgtatgtatacatgcatatatgtatgtataaaatacatacatattttatctatgtatgtggtagcacgtgagagaatttttgttaatttatatgttatttcacttcaaaaattgataaactgtgtgtgtgtacatatatgggtggtggctatatacatatagatattatatttctgggtggtttataaagagcagaaatgtgttgctcctagttctagaggctggtgagtccaaaagtcaccagcatgttaggtgtcttgtgagcccgcttcctcagtgacgttcatcttgttgatgattcctcacatggtggaggggaaagggagcgttctaggttctttttttttttttttttttttttttttttgagacagaatctcattctgtctcccaggctggagggcagtggcacgatcttggctcactgcaacctctgcctccgggtttcaagcaattctctgcctcagcctcccaagtagctgggattataggcacccaccaccacgcctggctaattttttgtatttttagtagaggtggggtttcaccattttggccaggctggtcttgaactcctgacctcgtgatccacccaccctggcctcccaaagtgctgggattacaggtgtgagccaccgcgcctggcctgtaggttctcttttacgaggcaactaattccaataatgagagctccatcctcgtgacctaatcacctcccaaaaagccccaaacccatctcctaatactatcactttgggagttaggatttcaacatatgaattttgggtggacacaaacattcattcaataacagtgactatactatcctatgttaacattttactattttcaaagcttttgttcactttgtatatatgcatttatttatctttgtagcaaatgaaggataaaaatatcttttggagtattatcttgacatactctccagctgctagggatgacctgtcagtattgaccccttgggctgaagcaattcgatcctctcaaaactcaaattgaagtgagaactatctcttctcctttatttcctttcaccagaaatagctatttcatgttttaaaacaactggaaggtaactgaaaactttcagtggtgttaaatcactgtcagaaaaaaaaaaaaaatctgtttgaaagttggaaacagctcaagtaaagccatttaatctgaccagcataagcagattctgaagaaaatggtgaagaatatcattagcagcaatgcacacagtcatttattcattcaacagatgaacatttgatgaacacttactggttcttggggactatactccatgcctaaaatacaaagatgaacgaagacccaattcttgctctcaagaaaatgatagtctgttaagaagaatttactggaagatagataagtataatactgaaaagtgtgaagaatgaaacaataagatgtgcaaagtacagtgctgtcacaaaagagagagaaataaaagctaactggacaggtcagaagaggcttcacatggcactgtcttgaagaatgcatagaaatattctacaaccagcaacttccaattcagttgaactatctccatgcttcctgttcaaccgagattacattttcaatcttgtttctaaaggaaggaaaaaaagatgagtcatttggtacaaaaaagcaagaacagctatagtctacactataagataaatgtagggtactctttaaatctagtggacgctgtccgtaccctttcagcgctcccattttgtctcatcatctaattgcgtgcacctgaagactttctctgatgggtttgccactgcggggaaggctagaagtgctggaatattgaagacccaagcagcattcttcaggttaataatagatgagaattggatgataaaaactctaaactttttacactcaaataggatgcatgaggcatgtctatttcatttgctagaagtctccagtggcattaagtcccagtcatccatagtcataacttgctcattaatgtactctgtgtgttcctttcttctctatctcacttctctacttcctgttgatgctttctgtgatctccatcacagatcttcctgtttctcacttcctgttgatgctttctgtgatctccatcataatcagctacatggactcaaatttgtcatttaagtctgatcttggggaatccaattttagacattgagcaatggactggctgggagggatgaaagaggagacaaaggggctcctatgttcctggttcaggaaacggatgaataacatcaccagttagtgaataggcactgcctttcagtacctacgggagtgctttgttcagtacatatcctgcccagccaagcactgaagaattcatgaattttattgtaacctaaactgcctgtggcattatgaacctgtgtaatcatgggtagtgttggctttataccaggattttgctagcttgttagcatctccatgtgcatttgcaagaccttggccactcttcagtgttttctactccaatttgcatcattgtccctgcaggatgtttatcactcagacattctgaaatttggactgatgcttgacttagctctgtgattggatgcttctcccagaacctttctcacctctatcagctacgctaatgataatctagacagaggtttccctccacgggtgctgcagctcaaactgtgccctagaccactgtcagtcaacctcttcaatgccactgtttggtgctttgcttggttctttcagtctgcatgaagtcgcagctactcaacttacatccatgaagcagcaaggggaaacttcccattctcagtgttttaatctgttctctgttataaaggaggcatagtagagttgctggaccccaaagagtgacttgtaataaaataattctttaaaatgtatacatagatcttgtatcccagggcacacatttgacatgaaaatggctgttttggttgtaagtgcaggtaacagccatcaaggtgtacttgggactcctcctccactccaaatcttaggcctcattattatttagtttatcctgtctgtatctgcaagatgatttttacgtgagaacactagacttaccccttgacactgtgctttttgcagctcctcatatttgatgggcatgaaagctaatatgttgtctaattatggagagttttaagttattaattttatttttatcaggagatccttaaccccctatacaaattagatctaaatagatactaaaagatgaagttaatatttaactcctttacccaccagatgtagctgaatctttgcattggacaagtgagaatcctacttactctgaatcttagatactttgctttgagtatgattcaatgtcactgttgctacagaagtataaatgatggttatttatgcttgcatgttttccagaaagttaaagactattttattatattggctttctgattacttgactgaagttcataaactaacaaataaaaatctaaaaacactctctggggacctagacaaactataatgattaaagcatatagttactttgaagccaagatgaggtaaaggggataacttaagacatatttattcttaggctgacatatcttgtcattattatgttacaggtgcacatggaccatttattttttctcttatgaagaatttcaaacatatacaaaataaaaaagtaacataatgcataccatacactgctcattagctctaaccattattatcattaccatctggtttcctctctacctacccacttcctattctctgttttgaggcaaatccccgaaagtatatcacttctactctaaacatttcagactgtattcccaagtaacccccccaccccacttcttttttttttttttttgagacagagtctcgctctgtcacccaggctggagtgcagtggcacgatcttggctcactgcaacctccgcctcccaggttcaaatgattctcctgcctcagcctcccgagtagctgctactacaggcatgcgccaccacacccggataatttttttgtatttttagtacagatgggatttcaccatgttggtcaggctggtcttgaactcctgacctcaaatgatccgcccaccttggcccctcaaagtgctgagattacaggcgtgagccaccgcacccagccccggaaaatatttgcttaatatcatcaaatacattttatatttcccaaattatcctataggactcctctcttctctctgttgtctctgtttcctccacaccctacatcctcctcctccctcatcctcgttctcactctcccttttcatttttgaagaaacaggaccttttgtctaggtttgttgattacatccacatgatattgtttaatgtgtttcaccagctcctgtggtgctgacaaattagcagctaagtctagagagctacttgtagtcagtttgattttgttctttttttactcaagatgattgtatagaaagtgttgtgtactttcaacaaaaggtatataacgtttgatattggcagccattgatgatcattgttttgattgattatttcattatgagttgcaaaacaatgatatactgtttttacttcttcatttgttaggaggagcagttctataaagagaactttttgttttgttttgattttttgtttttgagacagagtcttgctctgtcacccaggctggagtgcagtggcataatctcggctcactgcaacctctgcctcccaggttcaagcaattctcctgcctcagcctccctagtagctgggattacaggcgcacgccaccacgcccggctaatttttgtatttttagtagagatgggattctgccatgttggccaggctggtctcaaactcctgacctcaggtgatccacccacctttgctttccaaagtgctgggattacaggtgtgagtcactgagcccggcttataaagagaactctgcatttctatttggttgcctcatagtataattgatacaaagcaaagcagagtaaatgcttcagtttttcccccaaaagaacaattttcaaaataatgaattgcttctctagtctcttccaaaagttgccagtgaattttttttttttttttttttgagatggagtcttgctctgtcaccaggctggagtgcagcagcgtgatcttggctcacttgcaacctccacctctcaggttcaagggattctcctgcctcatcctcccgaatagctgggactacagacgcgcaccaccacgcccagctaatttttgtatttttagtagagacggggtttcaccatgatgttggccaggacggtctcgatctcttgacctcgtgatctgcccacctcagcctcccaaagtgctgggattacaggcgtgagccaccgcacccgaccaccagtgaatattttatttatttattatcatccagttgtttgttttggcatcactgcgaatgcatgaatttaaatatatttaaatgtaactgaggctctccaccttctgtattatgatctttattgtcctcatatttttcatctttatgcgatggaagcctcctttacattgacctcctgagtcctttctgtatgacctttatacactttggttgaccccaacttctcttgtagatcaccagtgggcattcctgaggtgtgggtataacatttatctctggattatttattcattcagaaactttacttagtaattaacatttactaggcgttaacaaggaagcagtaaagcagcaaacatgctcatttcaatatttggattaatacaatcaatcaaaacagtagttattgacaacttacttattgtgtggttagcacactcaaaatttatgcagagaaaaaagatgagagattagacctcctccttactgtaacacattttcaatctgaccagagattttgcttctgcaaatttggatgcctagcattggcatcatcaagactttcatagctatggaaccatcagatataaaatacaccttagtatgcaacctcaacgtgttcttcctcttgcaattgaggttatattaatttattaagttcattttgggataaagaagacagaatcatagttctttcagcctgttattataacactttattatcctttacctccttccaatttttgtgtctaataattcgtgtgcatgtgaactgtcttcacttttgagttttattatgaaactcaaactacaatacacatgtatgcataaatttctgtatatgtggcatgcgtgtatatgtgtgtatgtatgtgaatatataaatttcgttgaatagagtggtatgattgtctttggcctccttaattatatatattagcatatgttctagggctcctgacgcttcttgcaggcagaaggcatttccagaggttgtgtagatccatgaaggacagttatcgggtcacatctcacatcatcactgtttctttcttgcccctgtcttacactagtacccttcagggtattgtatgaaagcttcattggttcaaattcattttgtcctctagtgctactttctatgctgacaaaagcatagtgaaactgatgccctggcttgtactgcagtaatattgcctccaagcatatcaagtacaggaagttaaatcctatatattattaagccagatcagtaacatgtacccaacaatgtggtgagacatattttgttttaataaaacgatgatgttacaaattcttcaaccttcccatatgtgtggaggtgtgtgtgaatgtctgtattaatctaccccatgtctcctggatagagtttttctacaaagaaccaagctcagcttcccctagtgttaagacattttgcttcatgcttggtatagtgtagtgctactcaaacctgagtaataaacaggccagtttaaagaaataaaaagccctatgctcaaccaatgctgattaaaattatttttattaaaatttacctatagaagcacgaatataaaacaaagggcacactctttatggtgaaagggcatatagatctacaacaacaaatcatattttcaaatcaaataaaacagaagtacagaaaagcaatagaactcaaaagcataaccttaatgtgtctgccaatgttgtcttggatacattaaatggccttttataatgtgaatatagtactagctgcaatggtgcaagttattgtatttttagcatttttcaatatatgttgtgaagactattttactgcttttctctattcagatctttgcaaaaaaactcatgtatacactataatcatgttttttgccattttgtagtcctatgcttttgtgtcatcagccttccccagctagaaaagtataatattctattattgtatgctgttgtcattttcccacaatcaaaagtacaaattattaaggaaactgaagtttcggtctaaaatgtgttgttcagatgaaattatccataagaaattaaagttgtgttcttataactggaaaaagaacttaacgcaagtataatatgtgcaaaactgggatgacttagttcttgctatcattaagaggggacaaatggcaacgagacgagctttaacagctgagaaaatcttatgcctagatgtacataggcctggaaattacatagcagtaaaactgtaccttcaaatagctcaaaagcagctcataataactgcttgagattatctcagtgataaagtcagtataacatagtgttttttattttaaaaaggaaaaatgattactttctttacagtatgctaattaaaatatacaggtgattgaaaaaactattaataaaaatcagtaattttgttgagtgggattatgaatattaattatttaattaaaatttccttcaatagttaacaaagatttattgagtttctgagtcaagcattcttctaaaggctctgccttattagaatttttaaatgtatttgcaatgagtgtatattaaatgtaaaatgtatgattcaggtttaaaaaaaaatagcagtgagagtaattgaatgctgaggttaaatagaatgggtgaatcaaccataccataaaaaacttctaagtggatattatattccaggcactctttcctacttcagctgttgataaaatcaaatatttccttagagacccttgactaatgcaggaaataaatgaatacttgcctatatagacaaaataataacaacaaaagccagaaaccaagccataccaaaacgaaacaaaaacagaaaaactgtgatgacataacttatctttcaataggattttctcagaatgggaggcaatatatattttatgcttccatggtctgtagattccaacatttgtataattaacatatacaattttacaagggaaaaatactattcaacaaatacgtaaatacgttcaatgtaatcatgcagtacttcgtttaaattgaccttttttttttttttttttttttacaaatggtgcaataaaataatcatgtttaccttcttcacatgttcattgatgttggcgtgcacggttttatctatatgatgtgaccttttgagaccacatgacattcacaaactgaaactaaaccaactaaataaccagttatccaaagataagcaaaagtggacgtcagtttaattagtaaggggagattttaatcagtaatacactattataatagagaagagttcagcatgaactgaactgaactttgatttgtgtagaggtgactgggagttttaaagggagaatgagagaatgagtttgagtggtggctcattaaagtcagggaagtaacaaattacaaaaagtggaaaggtgggattgttccctgggaaacctctacgtttgctaaatggcacttaaggttaggctcctgccttctcactgtcttcgggttttgactggaacaaagggtaaattattttggcagctttgagttttctcagaaatgcaccttaagtggggctagagttatcctagagaggtggctttgacctgttagaagctatgttagtgttttttgttcaggtctgtgcaggccaaggttatggcctagctgagaagagggctcagaggagcctagctaaagtttggtcaaggggagcgtcttggtggagcctcactcctgttcaagtaaagaagacacattattcatccttctgaacagtgtaagtccatttgtcattcgattgccttttgtttactaaggactagctaaatcatcggttgagacttgctagtagagcatagttgctggatgatgcacgtgatcaggcatttaatgagaggcacctctatggaaacaaacataaaaacaaaaacttgttggagaagaatataaatcctatttgttgagtctagagggcaggcagttaagaagttttctagacattgaattctaagcatcttcagatggtagagtggtaatctgatggattttctggtttatggtttgaatgtggtgatggcataaacattaatttcacagtcatagttatttcctggaacagaacacggatgatgctggagttccagtggactttctgaatggctcttgtagcaggagctccaggcatgaaggttgcctatacgtgatttgttgtggtggtaagtcttttgaagtttatatcaagttcttgggcttcagtgtgcaaggctttttcaaatcctgggggagaaagacagctacaagacaaccttgtaggttgtcccagtagaatcagtaggttgtaggagtcccagtaaggatttgggcagtcagattttaattctcagtgatgtcaagtcaagagggaaggcaaaaaattataaacatcaatttggagagatgtagcccgatattgaaggaaaactaaacaattgagtatttagtaagagtggcaaaatgggtgagatggcagaattcagtttagtttacaggtaaatgataaaatcctcaagacaatgaacaaaattggaatctgataacccacagtggtgtgttttacataaaacacaacaaaaccggaattggatgagaagagtccctggatctagggtcatcagaatgtagctattaagagttggattctgaagccaaattcaaattaggtgccttgtactttgcgcactgaatgctctcaggcaaattatttaccttctttgtgcctcagtctattcatttacaaaaggaatcttaagagtatatatctcataggattgttttgaaaattaatgagtacgttacattcaactgtgtctgccacattgctgtgaagttattaccttcctaatatacttacaaacttcataattaagaaaaaataaaaattcataaaatgaacatatttgtaataacttattataaatattgtatagttcattaaatgtattacctttagacatattaaaaataacacacccctcatccccccccaaaaaattcctgtatgcctgttttaaagcagttctgcatgttaaagctgcatttatgatatctaagaagtgttttttctcctaaatagcaggttggtaataatgtatattgcaatcgtaataatgtaagttctggttacaatagtttatctgggtaacatgtagaagttaagtgaatgaggtaataaattaaccaataagattacctttctggtagggaggaaaaacacttctgggttgaattaatattttgtacacatatgaaaggaagaagaaaaataagaaataccatttgcaaagctgactttaataaattttaattgaatggataaacattttagttaaaggtagtaatcttaacttgagattacttgagataaaaatatatattttcttaagagacatgattgttagataacttagagatataataagtggaagggttttccattaaggtaactgatagtccttaggtaaattaaataatgggaggaacttgtgttaggaaatcaacatccgagttacagttaaattggtgggagtctttccagtgcctgaagatacagagattttcaatagaaataaggtttttctgagaaattaagtgaaataaaatgtgcaatagtgattgataagcactgtttattgaagaaacgatttatctttattcttgccctttgctttttaaaacttttattgcattttcttctatttttaatacactttgttattgaagcataacataaccatataccataaacacagatagctaccactcagatcaccacttggatcaagaattaggaacgaacatatttgattttaactgcagtctcttctctcttacgctgaaaatctatgtttctaatgacattagtataattgcttatatggtaattaccttactatatacatataatggttccaaaataacagttcttgaattatttttataaaacaaaattaacacaaagatttatagtgatttctgcatttattttattattatatgtttacagacattggctaatgcttctgatgatcaggcttctctcgattaactgaagatagccttactctgcagctgtgtatttcttattccatctggagcctatgccatcagacattatgtctgccatattttttcttctgtggaaaatcagttttctttctgaagtgcttatttttacctttggctgctgatgtagatctttcatttgttcttcatcttaggctgtgccctggctctaaaaagtgttctcactgtctctttgctttcatttttttcctttcctatccctacgcccttaaatcacaatatctgtcagagttccagaagaaagaataaatactcaaaggagtcatgactattataatagttgatagtgtttactttggcctagttgtttctagatttgtctcaagaagcaaacaaaccaaggattatatatataccatcttgaccacaaaccaagcctcagattcctctatacatatgtcttaagttaccaatacatgttaactgttataatatttctttgactatatgtatacaccatgtagatgtagactatgtatactttgcatcctgctgtttatcacatgcctggcacatattaggcactgaaatagttgcttaatacatcaaaataaaattgaatagggaaaatataatttcttaagttagcattcccctctctccacccaaaagtattaaataaaaaaacaagagtttacgatgactttaacattatgatagagatacaagaaaaacaaataagtatagtaattgaaatggtgcccagaacaccctctttgttgacactaaaagtaagttcatcagaccaaatctgtactgttcagctctggggaacataatttaaatgagacactgaaaaactggagcctgtctagaaagcaacttataattttagggacgtattagctgttttcaaatattcagctaatcagtggaaatgcaatgaagcatattcttattatgatgagaagaaaggaaagagagccctttgtccactaaatatttaaacaaacaaactttgtaacagtgagagatggccaaaaatataaaaagcttaatctggaagtagtgagttgtttttcactggggtgtgggcaggggcttcatgtctatttaaggaatgctgtgttcccatggaaaaccagcacaagacaaggatgccctctcttaccattcctatttaacatagtattagaagtcctgaccagggaaatcaggcaagagaaagaaataaagcgcctccaactaggaagagaggaagtcaaactatctctgtttgcagacaacatgatgctatatctagaaaaccccatggtctcagcccaaaagcttcttgtgctgataaacaacttcagcaaagtctcaggatacaaaaccaatgtgccaaaatcactagcattcctatacaccaacaacagagagaaatctgttccattgcatctgttgcatgcagtgcaacagggagaaatcagtaatgcaatcacattcacaactgccatagaaagaataaaatacctaggaatacagctaactagaggggtgaaagatctctacgtggagaactaccaaacactcctcaaagaaatcagagatgacagaaacaaatggaaaaacattccatgttcatggataggaagaatcaatatcattaaaatggccacactgctcaacgcaatttattagattcaatgctattcctattaaactaccattgagattcttcagagaactagaagaaactattttaaagttcatatggaaccaataaaagagcccaagtagccaaggcaatcctaagcaatttattagagtcaatgctattcctattaaactaccattgagattcttcagagaactagaagaaactatttcaaagttcacatggaaccaaaaaaaagagcccaagtagccaaggcaatactaagcaaaaagagaaaagctggatgcatcacattacctgacttcaaactatactacagggctacagtggccaaaacagcatgatactggtacaagaacagacacatggatcaatggaacaaaacagagaaccaagaaataagactgcacacctagcaaccatctgatcttcaacaaagctgacaaaaacaagcaatggggaaaggactacctattcaataagtggtgctgggataactggctagccacatgcagaagatagaaactggaccccttccttacaccatgtacaaagattaactcaagatagattaaagacttaaatataaaacctcaaactataaaaaccctggaagacaacccgggcaataccatttaggacataggaacagacaaaggtttcatgacaaagatgccaaaagcaattgcaacaaaagcaaaaattgaaaaatggcatctaattaaactaaatagtttctgcacagcaaaggaaactatcaacagagtgagcagacaaactacagaatggaagaaaatgtttgcaaactatgcatccgacaaaggtctaaaatccagcatttataaggaacttaaacaaatctatgagaaaaaaaaaccctactaaaaaagtgggcaaagggcatgaacagacacttctcaaaagaagacatacatgcggccaacaagcatatgaaaaaagctcaacatcactaatcattagagaaatgcaaatcaaaaccacaatgaaataccatctcacaccagtcaggacggctattaataaaaagtcaaaaaatagtagatgctagcacggttgtggggaaaaaggagcacgtatacattgttggtgggactgtacattagttcaaccattgtggaagacagtgtggcaattcctcaaagacctacagacagaaataccatcaacccagcaatatcattactgcatttatacccaaaggaatataaatcgttctattacaaaggcacatgcacacgtatgttcattgcagcactattcacaatagcaaagacgtggaatcaacctaaatgcccaccaatgatagactggataaagcaaatgtggtacatatacaccatggtatactgcgtagccataagaaagaatgagaccatgtactttgcaggaacatggatggagttggaggccattatccttagcaaactaatacagtaacagaaaatcaaatactgtgtcttctcacttgcaggtgggagctaaatgatgaaaacacatggacacttagaggggaataacatacattgggacctgttggagggtggagggtgggaggagggagaggattaaaaaaaaataactgatggttagtaggcttatatctggatgacaaaataatctgtacaacaaatccccatgacataagtttacctatataacacacatgcacatgtacccctgaacttaaaagttaaaaacaaagaaaagctgtggataggtttggtggacaaactaggaactggagaatatatgggaattttacaatagtctcactggagccttagtgggttttagtagtgtttcaagggccatgtgtagggtgagaagacagtggatgcccaccaccaccactaccaccatcagcattcctttagctgaatagctcactcttcatctgtttcatattgggcttctgggtcacattctatttaaagaaagagtttccactcgactctgaggtccttgaatccaaagtatctctcataggtccttggagcaatcgtattggaatttttaaaatgttgattgaatggcttgaggtgaaaggaacctgttgcacagaactagttctctgttatgagtccacaaaggtcttaaattcgataaacattgtttttactagtaagtgtcttagtatcttaaaattatagtaagcttgattcttttctatcatgttggcacagttcagttagcaaataataaaatgaaacaatgatgatatgtaggtagacatattaacatgcctttgtatggagcaaacaataagaagcagatgggacagtctgaggaacgcattaacaagagtttctgaagccaactgctgctgcacctgttaacctggaaggagattaatgcagtagaacagctactgtctttccatatttcttaccacaaaaagatgttttattacattcattgtaacctcttggtaacacattcagaatacaagcttcttcctagtttccgcacatgtctttctcatgatagcatactgtctttgaaaattccatctgctttgatgatttgggctattctatcaaggcaatataaaattgtttttcttaaactttattacaggtcattgagtttcatgatctatagtgaatatttctgtattgatttgttggtatttttattttctcttctcaagctccttgtaagtggggactagcaatgtattttttaattttccgaactatttaaaatctttgatgccaatgattcaacttaaattctggttatatacaccaatgataatattttgtatctagccgatatttaatatttatcatttttttaaagaatcattcactttcatcactatcatagagatgggacaaaaaatataaagactattttacgtatgtatgacttgcttggtaattatttgctgaatgaatgaaaaatacaaaaattgatagttttgctcttacccatcttgtatatctcttccagtgctcattttgcattatgtattagttcatctttgcctttattaagagtagaaaacgccatttcatcttttacatataaaaatgagtctggtctgatacagttactcacatcttcgcttaaatttcttttcttcttcttttttttttttttttttggtggagtcttgctctgtcacccaggctggagtgcagtgacgcgatctctgctcactacaacctccatctcctgggttcaagtgattctcctgcctcagcctcccgagtagctgggattacaggcatgcaccaagccacccaactattttttgtatttttagtagagacggggcttcaccatgttggccaggctggtcttgaactcctgacctcaagtgatctgcccgtcttggccttccaaaatgctgtgattacaggtgtgagccaccgcacccagcccagtgaaatttcaatttgaatttggaagctctactaaggtagtaatgtgaactttcaatattattagaaagctcatcaatctgaaatttaacataaggtaaagaaataaaaagcattaagaccttacttcatatgagagctagaatccatgacctgaaaaataaagtagataaattcacttataaaactataatttaaactcttaacttgtaaatttggggaaattagtggtgaatgggtttctaatatatggaacatgaagcagtaggaaatatgttatgagttgtgacagatattccacctcccacgagactgtgatttttagaatcgacgtgttataaaattgatctgaactttgtccctgatgctggaaaagtggcaacctgtgactgctctaaagtaagctaaaggagctgaacaaggctgggcacagtggctcaggcctgtaatcccagcactttgggaagcagaggcgggcggatcatgaggtcaggagttcaagaccagcctgaccaacgcggtgaaatcccatctgtactaaaaatacaaaaattagccgggtgcagtggtacatgcttgtaatcccagctactcggggagctgaggcgggagaatcgcttgaacccaggaggcagaggttgcagtgaaccgcgattgtgccactgcactccagcctgggcgacagagtgagactgagtctcaaaaaaaaaaaacaaacaaaaaaagaagctgaacaaatgctggcattcatacatggtttgagaaatagccctttttcatttaagggaaagacttactgagatccagattgagaaaacaccccatcaacaataaagtggctcaggaaaatgttttatactagcacatcttcaagtttctacttaaggctattctacatgaatatttaaaaagaggagatgtcaaatataaaagcacaagaggccccgagggcttagtatctttatttgcgttaaggtttctcataaataattctatttggggatataggctctggtatatatgtaataaatgtgagtctttttaatatcagagttacccttaggatagtaagtgtatttatttcaaagaaatataaaaataaaatgaataaaatatttcaggtacctcagatcattgcaaattagtcctcaagtctctttcagtttttcttggattatatgaataatgctttgggatagaggaaactcaccaaagtatatttctgaggactgggggtgggaaaggtttcagaaaggagaaacccatgggaagaatttttctactgactgtcaagtaattcatctcaacagaagaaaagctgattttcgatcagtttaaggtaatagaatatgtcagaattcctggggttttctttgttcaatagcccacttaacctgctgcagaacaccctaggaataacaaatgaatcataaggtagagggacattccagcacacttgttttcttcaaatattgatattttccccttaaaattatatgtctagaaaagcttttgctcggacagagtctgtagggccagaaatataaataactgtcaaatataaagctgaatcgcctccacaagattttaggaacttctgggctggggaaatgtggcctgaaggaaggctgctggtttggccactctctgtattccatcagaaaaaatggtggggtataatcagaagttgaaatgctcacagtagttttaccccatggcttgtcagctgaatattgcgacaatataggaattcttcatcgcagaaggaatgagcctccctggactgatgattttctcagtttatggtgtgtgtgacgtttttgtaaagtggcaaatagttgggggcatgagctagaaggtaactttaggaggttcaaccaaccaagtaccacctgcgaattggacaaaattcaatggacaaaagaaaacttaattgtcagcttactcccgccttttactcccgggacctagcttatagcacatggttcataaaagactctataaatgattactgaatgaatgaataagtgaaagtgcacaaatgaatgtatctctgagattttaagacacttttgtgttcatgcgtcttgcctacctgtctccggtccttctgaattcataaaaagaagaaagttcattttttctggaatgactgatcttaggaaataggaataagtaattctgatgggtagaaagtgcagtgtatgaagattcagaagggtaaggccaattaatttaaacactctgagtctatgttctaacctgtaaagaaggctgataatatttgccttctctgctatggtgttcccgaattgtgctttccaagaaatataccatcacacaatatatggccgtggtgaatacagtctccaatgtccttctccccctgcaatgtgccaacagagtgatctccctaagcatacagggtggtgcagtgtaaaggcacactggtttctgtttgaattccagctttgctacttactacctccataatgtgtagcaagatacttcatcactcacctgtaaaatgatgataaaatgatacttatttctatgagaattaaatagctgatacaagtaaagagcttaaaacagtatttggcctgttttaagtgctcaatagatcctagatgttgtcattgctgttactactgctgctgctgctactactactactactacatatttgtttttggaccctacttaatcccataggttgccacaactactgtctacataatgaaatctaacccccaagtataggatactggtttctaaaaatctagttcatggctatagttctagcttcattcaccaccgttctactagcaataccagtccatctgtatttcctccaatagaccactctatttttttttttttttttgcctctgcacctttacactggatgtttattttgcctttagtcacatatccacaaagagatgttctgggctccatatgatggagttgcatacagtgctgagcttttctttcagggacatattcagaaaggatgagtttttgattgttgtcaaatttgctgttatgctgattttttttagaactgtttgggcgactaatacaaattcatccaaagcttgttaagaatacattgtaatcatcagtatttttaaaaagcgattcttcattctttaccattgtgtttcccatcccaaggatttcttcagattaaaatattaaatgggacaggcaacactttgaatgtaaaggagaaatgggaaacactaacacaatggtggcatgataggggatgaaacacagaaagttggaaccaaaggggagcaccatcgttcatatttatgtgtaaggaaaagaacagaatgtccttgggtagtttactatttcttaataattctcctcacttttaggcaagcttgccagtttttttcagtggggatcacaaatgcctatctgtctgtctgtctgtctgtctgtctatctatctatctatctatctatctatctatctatctatctatctatctacctacctacctacctatctaatctatctatcatctaatatattatgtgtgcgtgtgtgtgtgtgtgtgtgtgtgtgtgtgtgtgtgtgtgtatgtaacgatttaattgaagcaatggtaagacattacaacttcaaaaatactgttttacttcacatacactttacctctaggtttcatagcaagacaatagatgggtgtagttttagtattatttacttttatttgttaattcaaggcactatagaaatacttaatctgtttaaaccccaaacatctctttaaaatattttatgtgacgagcaaacagaacatcatgatctaataaaaatgaaaatgtttttgatgttaaatgttgaggtaaaacttttgttcagttattataaaataatgacattttgagaacctcttatttttaattttatcgtctctaaaattgagacaatcacatcttggtatcgataatttttgatgcatgatgtaatatttaaaggactttaaaaatgtaaaatgctgcataaatattattgctctgcttaacagtgtttcaaatacatttttggaaaaatagcaaagtaagagataacatgtatctaaagttctcatcccttatcaactaaatattatgaaaaccttagcttctcttgcttctccagaatgacagattagcttcagcctaccttagactaggcatatggaattggcaaacgctctccttagcaactgcaaagttcaccgcagatgcatttaacagaaatagcacagatacaattaagcaggtagaaagaaagaatgagcatgtaaaacacctacaatattccagatttcctgctcacttaattggatgattcagatacctctctttcataatgtccaggtgaaagaaatgccggttcctcttatttctctacatcaaactaaagctccacttaccagagcaaacacaagtacaatctgttatgttttggactgtctaatccattctctgtagtttcacaagaatctggtgagcttacatggcatccagagaacagggtgatgagtaaagcccttaactctacattgtctaaagaacctgatttattcaaagaggaggcagctctctcacttcttattaacagagggtagagagtttctttcccaaggccaagaggggttttagctattaatacactttctctccctccgtccctggtgtgtgtgtgtgtgtgtgtgtgtgtgtgtgtgtgtctgtttctctcactgtcaattttgagtggggtttcaaggtttaaataaggtgacaagtctagtagaaaaatctctgaaagagctatttgtagaacattaactgactagttgtgtgactttgtacaaccagcttaaggattcagttttataacagataagtttagggaaataaattgcactgcacattgccttcggtctgttgtacctcaaatagcttaggaatctgttttctcctaaaacatcttcctggaagctgggtttccgctccaccccacctcccatgtgtttatgcattcctctgctcctccccttaactgagaatcctcattagaggcctgggtaaaatgtttcattgttagagttataatatatcaataatttacattaccttaattttgtaatttcccagggcattttgaaatgttatgataacatgaaaaatgtatgactttcctcaatgaaaagttaattaacaattgcttttattcttcaatgaacagctttatggctaaattattactagttttgtttttaattagatgactaaataatgcaaaattagaccatctttgtcctgacactgaattagaccattctttggcaactcgtgtacaaactattttcatttttaaaaaaatgtatgattctgagaacaagtaaatgcaattagaattgtctttcagagggaaagtggccccaaatgatgtcaagaagccagttttatgataaagatgtctatttttatgaaataaaagtaaggagaaaaaaagaattaatacaacttcactttgagattttatttttttaattcttgagttaggctgaaggccagatttgtaattgctcgtgtatgtgctttctaaaacttgcttaaggaaaactggatggattttctaaaaggcaattaaagatttgcagttgaaaaatcatcctccctcataagtattggtgtatacagtggtttccctgcatggaggatatgctggacaatatattgagaactgcagctccaggcaaaattaaactagtgttttttagagatactaggattagcttgtttactaatttgttaaagcagctgcgtttacgaaatacataagccttaagttttaatcttagaaacaccctttcccaaatattctaacaagctcaatggtcctctgcctttgctgatatttagaacatcacgagagtctttaaaacttacagatgcctaggtcccacctgggaagtttctaatttaattggtttaggtggcaacctagtcactgggctgtttaaaagctccccaggtgactataatgcacaggaaaggttgcaagccattgaacttgtaaacaatatagcagctcccatacaaaagcccgtaaattcaaagaaaatccagccatatgaacaagaaaaaaaatgtcaacgaagcagggacttcataaacatatgtttgcaacaacacatcattgaatatgattaatttgatatatctgttttgttataaaatgtctagaaaaaaatgtaatgtaacaaaaccagcaagcaatttaaaacaaataggaaaagatgattagtagatcatatgatataatttttagataatacaggaatcggacattgaatttacgttagatttttatagacagatatacagaaaaacactcagagtagacaacaggatgttagcagtggtgctgcttaatgaaaaaatgagttatctgtacttttcttaatagttattgttgtatctttttatggtaaacatacattgtttttgtaacaggagagaaaaagtagtgttctttccttgaaccaaaaaaaaagtaggccatttaaaaattaatgaataaggaaaatacacatgaaaacttctggaataagaacaaagctgtaatcaaagaaaattaatagccttaatttttttatatttgagattaaagggaaaataagagaactaaacatttgattctgtaagaaacctttaaaaagcagtacaagaaataacttcaaaaatactatattgagaaatgctttcaaacaactaagtatgaattatctgtttacaaaattccaaaccatgaaaatagtatttaaacctctatgttcatgttctaaagcccttataatcttgattatgagacttcaaaaaaatagcatacacattgaaaactatcaaccaatctcaggaatacagacgttcaaatcttataaaacatagcagatttagccaataagagaagaagttatcatgccaaattggatttatttcaggaaaacatatatgcctactataagagaatctatttacatccttcattgtaggtaaagatcagaaggaaaaaatatacaatactttttagttatgaaaaagtattgataaatgaaaagaatctgtccctaatttaggagtagaaacaaaacttttagcaatgtaagaatagatgatagtttataagcatgaaaaatattgtctatctcaaaacaagagccaactctgtgatcaatgttgaaatattgaaggtatcctcattaaaattagaaatataactagaatgactaccaaaactgctctttttaaatgctattttgcatattctagtcagtgaaagaagccaagtaaaagaaacaggaagtataagtattggggaaaaaagtcaaattattcatattaatagatgatattgtcaacttggtactaagtaaatcaacaatgacaactattataactaatgggaaaaattagtcccaaagctcattaagaaaagaaaaaacctagaaataattaaatattaattaaatgtaatttttctaaatgctaatttctcttttaacaacctattgaaaatcaaagctatcattttccacagaagttcaaaatgtgaaattactgtgaatttatttagcatgaaatttggtgatatacaagcctttactggaaaaataacagaatatttgcatccatggacagatataattttatatttcttggtgggaatattaatattttagacatataatttactacaaattaagctaaaatctgatagaaacacataaaatttaaattggggtggcaggaagacattggatgtgacaagaattactctaaagtttatctggcagcaatatagatgaggattaatagaaaatgttgaaaaccttaaatgaaaggtcatttgcccatgtagctattagagtgtttaataaaacttctactggctgggtgcggtgtctcacgcctgtaatcccagcactttgcgaggccgaggcgggtggatcacctgaggtcaggagttcgagaccagcctaaccaacatcgtgaaacccagcctctacttaaaaatacaaaaattagccgggcatgatggcaggcgcctgtaatcccagctactcgggaggctgcggcaggagaatcgcttgatccagggaggcagaggttgcagtgagctgagatttcgccactgcactccagcctgggcaacagagcaagactctgtataaaaaaaaaaaaaaaatctactaaaagtctatacaaacagattagtgaaacaaaagagaaaatcccaaaatatgctcaagtgtatataataaaaatggaatttcaaatcagtggatagagatggactatgaaagaaatggttttgataatcatgttaaaaggcaaaaccctgctttacacaatgcagtgaattaaatttcaccttgaacaaatattcaatcataattaagcttaagaagcccaaagaacaggaagaacgataggtgaatatttctacaatgaggcgatggtagagaactatgtagaaatgattttaaaaacccaaaatttaaaatggaaaacacatagataatttttaaaatctgtacattaaaaaccagtaaactgaaattgaatcttacaaatcaattcagaaaaataaatgcattgcctaattttaagcatacaggaagaaagtgttagacctggaggtcattattttaagtgaaatgaaccagacacagaaagtcaaatattgcatgttcacccataattgtgtgctaaaaaatgtgtacacatgtacacagagagtggaatgatagacaatggaaacttagtagggtgagggggttggagtggagtggataatgagaaattaatgtgtatgatatatttgggtgagggacgctctaaaagccctaacttgaccactacacaatctatgcatgtaacaaaattacacatgtaccccatatatttggacaaaaagaaaataaaacacatccaaaggtatatgaaaaaatgttcgatctcatttgtaaccaaataatgaaaataaaaataacttttccttgtatactttgtatgcttctgacagaagactgaatcaatttatttcatgagagcagtttgcaataccaatcaagagaaagcgtgcttacacttgactaagcaattgcatttccagggaaattatcgaagaaatgcttacatctatgtgcaaagactgagttgtacctatatttattgtttaattgttattacagtgaaaaatggaaacaacaccagtattcatcagtaggaggctactaaaaaatgatatatctctaaagaagggaaatttaaaataaaattttacaggtgattgcattgatattaaaggtaatccaaatacatacatgaaaaaataaagcagactgtaatacacagtatgtatacatataatgctgtattatgatcccgcttatatatgcatatatattaaaatataaatttttaacctctgggaaatgcattcctacctaattttaagtctctcattttttcttattggaattttaaaaagtgtacaatgcttattaatgaatataaatttgtttgaatcaatgttttcaatttttaatcaaattatctgtacatgattcaagtaatttttacttcataagttcttttatttaaatatgctgcattcctctctcatttctcactcctcagaggcagatatttgagtcattctctttttctaatgcgtgacaaatctgtaataacatgtttatatctctaattcttgattttctcattttttcatggtctacagtctctcttatgagagatgaaaaattatctcatttatatctaccccatgtatttgttctattaactaatttttcttttacatgaagaccttaaatgttaatttttttcttcaaaacagtgtcaaaagtatgtcttaacccttcacatgataaaatggggattttagtggtcctccatgtttcttcacttctcctactgaatttcttctcccaaattctgtaaagtctacttttaattttatgttgagttgcattccttctgtgttctctaactatgattaggtctcgtgttttgtcaaagatttattctaaaaattgaaaacatataaacagtatgtacactattattatagcaccataaatatatttcattgcagagtctattaccgtgttgggcttatatttcctttcctatgatttccatggcaatttacctctgctactttacagaaaatttcaagattcaagttaaaatggattctctttttttttctttttttgttttttgagacagagtctcactctgtcacccaggctggagtgcagtggtgccatctcggctcactgcagcctctgcctcctggattgaagcgattcttctgcctcagcctcccaactagctgggattataggcacacaccgccacacctggctaatttttgtatttttagtagagatggggtttcaccatgttggccaggctggtctcaaactcctgacctcaggtgatccacccgcctcggcctcccaaattgctgggattacaggcatgagccactgctccagccaaaatggattatcttttcttacactcagtaatctctcaaattcaaataacgacataggaaattcctaagtctattgagtctttatctaccaaatctccctctctttcactttctctgtctctcttatgtacacgtagacacgcacacactcccttctcaaaaggtaagagaataggatggtttgtaaaggggaaacgtctctggaaacacccacactttaataatgtcttaactaatcacattgcttgggtgtttttgttattttgtagtttgcggttttgtttgttttattttctgataacctgcagagtaggaaagaagagagtccagaaacttgttgtaaagctggacttcaagttggaagaaatattggaaggaccttttaaaaagagagttgtatgatatcgaagcagcctatttccctgaccccttcccgggactcgtgacagggttgcctcatttacctagaccagttttcaactccttatgggagggagcatgcaagtgaattccaggggtttggggtacgaatgatcctgtcacccaggtactgagtatagtacccaatagtcagtttttcaacccttatccccctccctccttccccttctagtaatccctagtgtctatcgttttcacctttatgtccatgagtacccaatatatagctcccacttacaagtgagaacatgtggtatttggcgttccgttgctgcatgaattcgcctaggataatggcctccatcacagctgcatctgtgttgctacgaaggacatgatttcattctgttttatggctgcatagtattccatggggtatatttagattttctttatccagtccaccaatgatgtgtatctaggttaattccatgtctttgctattgtgaatagtgctgtgatgaacacgtgaatgcatgtgtctttatgttaaaacaattttatttattttggatatatattcagtaatgggattgctggattgaatggtagttctgtcttaaattctttgggaaatctccaaactgccttccacagtggctgaactaatttacattcccaccaacagtgtataagcattcccttttctctgcggcttcaccagcatttgttgttttttgagtttttaataatggcctttctgactggtgtgcgatggtatctcattgtggttttgatttgcatttctctgacaattaatgttattcagcattttttcatatgcttgtaggctacttgtatgtcttcttttgagaggtgtctgttcatgccctttgcctgttttttgatggcgttgtattttgcttgttcagttttttaagttccttgtaaattctagatattgaacctttgtgtgatatgtagtttgtaatgattttctcctgttccgtaggttgtctgttactctgttgatagtttcttttgctgtgcagaagctttttagtttaattaggtctcgcttgtcaattttttggttttgctccaattgcttttgaggatttagtcataaatgctttcctaaccccaatgtccagaatgatgtttcttaggttttcttctacaattcttctagtttgaggtcttacatttaaatctttaatcatcttgggttaatttttatacatgtcgaaaattagggatccagtttcattcttccacatatggctagccagtccatttattgaacagggagtcctttcccattgcttatttttgtcaactttgttgaaaatcatatggctgcaggtgtgtggctttatttctgggttctctactttgttccattggtttatgtgtctgtttttgtgccagtaccatgctgtttttgtttttgtttttgctcttatttaaatgttataaaaattgcctatatttaagatgtataatgggatgttttgatgtgcatatacgcagtgaactgattactacagttaagctaattaacatatccatctcttcacatagttattttgtgtctgtggtaagaaaacttacaatttactctcagcaaatttcaagtatacaatacagtattactgactatagtccctatgctgtgcattagatctccagaacttattcattgtatgtaactgaaacgttataccatgctgattcggttgctgtagccttatagtatagtttgaagttgggtaatgtgctgcctctggctttgttctttttccttaggattacttttgggctcctttttggttctatatgaattttagtatagcttttttccagttctgtgaaaaatgatgttagtggtttgataggaataacatttaattcgtagattgctttgggtagtatggccattttaatgatattgattcttctaatccatgagtatggaaagtttttctatttgtttgtgtcatctgtgatttattttagtagtgttctgtaagtcttctcatagagatcattcacctcttttattttttatggctattataaatgggattgcatacttgatttggtgcttagcttgaaaattactggtatgtagaaatgttactgatttttgtatattgattttgtttcctgaaactttactgaagtcagtgctatttttagatggatatatgagaatatttaacttatatggagagtcatagaaattacacaatttgtatttcatacatcatccacacacatgctttctttacttaccagaatagtggaaatgctgcataaaatgaacttaatggtttttatttcctttcttcataaatgtacagtttatcaagaagatgccctttggcttactgacgtgtaaggagggactaaaaggaaaggaaaaagaataggtagctctaacttttcctttctgtctacatcatcattttttattgcaaggtggttggccaatataaggaaggaacaccactaagaaaagatattatgtggttttttggtcattagtgtttcttagaatgtcactcacttcttcctgcatatatatatctcaaatatatatatacacgtatatacacatatatatacatatatatctcaaatatatatacatatatatctcaaatatatatatatacacatatatatttagaagattatttggtgaatacactattagaacaaaaagaaagaagtattagcgaagtgacagggtatttcccaactcagatatatgatacctgctaatggactgttcgtgattataaatgtagtatatgctcattgtagacattatgaaaaacgtaaaatcccctataattagacctctatttgtgctaggcacatgatgacttttcttgctctgcaacaactattttttttctcttaaagtttataatgttgtcagtattgtcggatatcctcagggattccatcatcttttcttaattgtggttaattacttaaccaattattacaaattattttcctataatttattgctcttagtatcaaacaattaaacaccctaggaaatgtcttattacttgatctatgaactggtgagaatctatattctacataggggcttgttttctggttttaaatctaatacagtcgtttggcaaataaagacaaaaaataaatgttgtctacctacttttcaattatccaagtagtttaaaataaaaacatccttactgattttttaaactcttatataattgcctaattctacagtaactggggttggtagtaactaaaacctgttgtattcctagtgatgcccaatgagccttgggaaatgaataggtgggtatagtccagttgctagaaaatacttgcttgttactgacttatctgagaggaaataaacactttcatttatcagggacagagtataaagtgttcctcactgaagcatttctaaaagctctacagtcctttgaatactgataaggactctgaaatgcaagggaaaatatgcaagtaatctggactatcacaggttattttatgaactgctcatatttttactcctttgataagtattatttcccccaaccccaaacccgataaattcgataacccttttcatatataatattatcagcaaggcatcttagagtttcctttaaaaaatgtaaattaccaagagaaccagaatgattttggggctcataatggtagatcttaaagagagtggaaagatcagtagttttcgcattttgctacacattggtggagtgtttacaaacagtgatatctgcgttctatttccacagagtctgacttaagtggtctgtaatccgagcatctcagtttgaaaagtttcctagataattttaatgtgtatccaacgttgaaagccagagtaaaatgaaggaagttctggggcctcagataagcaacttcactacttttttcaggttctttgaataattgacatcatccccaaattcaaatcgttgatagtcatgatgagtacctgttttactccagaaatctatataatattggttacctcagtgcttgctcttaacttccataatcaaaggaggaagagagactcatcgtgttcagatacaggttgtgtaacgtgtgtctgtaaaatactaatgtgattgacttcatccatccattcacctatccatccatgcatccatccatgtatacctcgtgtacctccattcgtctactcatccaatgtctctgtctaggctccaggactgctgccttaaggttgtttaccaactcagtaggtagtatgttatcctcaggctttggaaacaggggggtttagttaaagagcaaaccaactcaacatactagattaacttgaaagggaaaagttatgcttagtgcataaattctttccctcttgtcctttcaaatccatttttcattctttaccactgtgctttgtgtcctggggactgccctttaggaatggcatcagagttcctttgccctacagtttccagttgagacaggctgcagcaggaggagtacagtggataagaaaagggtggagtatttattttcatgtggccccatgggatttccacaggttagctctgaacagctaacattagaccagagcttctgctggacagttctctcttgcatttctattgggtctggctctctagttcaggaaacgtccttcctcttaacccttgaggtctacagttaactctccgtcatcccttcttgaatttcctaacactgagcatatctctgttgataacccctttagcaaactggcctcacataccccgagattgagaaatcaatcctccagtttctaccgggactctgattgagttaatgtgggataatttgcttacactaccctcttataaagtgactatgtacattagcatattaactcctttgaggattttcatttacttttgttattaaagcattacacgttttttgataatgtgtaggagactcaatcatagccagaagtgtctcagacgcaagcacctgtaatgattcccttatatacagttttatcccaccagaaattgggactaggcacaagtgttctaggtaacatttcaggatcctactgtcataaagattattatggcacaaaaactatttggctagaagtatccccagactcctctgtgccacattatcttcctttatccagttatctgaggatgtgcttgcagtggcagactagcttttggggaaattttatttcaagaaaaaaagcagggaggaagaaaagggtaagaaatgaggaagggaagaggcccatgggctaggagtgggctgtcctgtttctgggaaactttgtgaaggtttcaggagtagtagtaactcatggtgaatgaaaatgagagggaattgttggcttttaaagtaataggatatgcccctttatgatgggattaagagatacaagtaagctgggcgcggtggctcacgcctgtaaatcccaacactttgggaggccgaggcaggcagatcacctgaggtcaggagttcgagaccagcctgaccaaagtggaaaaagcccatctctactaaaaatacaaaattagccaggcgtggtggtgcatgcctgtaaccccagctactccggagtctgaggcaggagaatctcttgaacccaggaggcggaggttgtggtgagctgagatggcgccattgcactccagcctgggcaacaagagcaaaactccgtctccagaaaaaaaaaaaagagatacaagtaaagttatgaaatcacctgtggtttctagacagttttttttgtgtgtgtgaaatattaagaacagaatacatgtgctaaaacattttaaaagcttaataaggtcttttaaatcttgcctcttccttttgctcgtctaatattacctcctatgtccacccccacggattatttacatttaatgctttctagtgaaatcattaaaatgagatttatggattattcataataggcaggatgaaaaaggaaggtgaggcgacagtgatccttccttagctgttaatggataaggagtttcacagcaagaggaaaaaggcataacattagtattaccggttgtctaagggggagagatagaattgtttttttttccttgcattttctgtactctactcttatttccaaatattctttaatgtttgtgtgactttgtgacttctatattcagcgcaaaaaggattaaagaattaatttaggaaatcaatttacactgagtgtctccagtgccagagagggagggaaggacattcgtagctacagtgttcataatagcaaataattgtattatggtcataccatggaatattatatagcagtataaataattaactatgatcacatgtaagaatatgagaaaatcataaaaacataatgtagaggtccacaaacattttcttaaagggccagatagtacatatttcaggcttctaggtcatattgcaaatacctaactatgttgttgtggcatcaaagcagccatagttattatatgagtgaataggtgtgagtgagtctaataaaacttcatttttaaaaactgtcagggaggccgggcgcggtggctcacgcctgtaatcccagcactttgggaggccgagatgggcggatcatgaggtcagcagatcgagaccatcctggctaacacggtgaaaccccgtctctactaaaaatacaagaaattagcggggcgtggtggcgggcgcctgtagtcccagctactcgggaggctgaggcaggagaatggcgtgaacccgggaggcggagcttgcagtgagccgagatcgcgccactgcgctccagcctggggaagtgcactcactccagagccggggagcccatgggcggtagtgtgctgacccttgtattagacaacactccagaaagctcaagcataggaacacctaatgaaaatattgttttggcatacatgcatgtgtgataaatcgaaaaaaccaacacaaaacaaatgagcaaacaaaagaaatcaaaggcaatgatatgacaatccccagattctggatggtagttaatcctgggtaaatggagggaggggtacaaaagagtgaagaactagtgtaggagcacataggttcaggtgtgagttgttgctaatatttcagttattgggatggacatatgtttgttttattattgagctttgtaatttacatatccattacatatattcttttatgcatcaaatatcacattacacaaagggaaatcataaaaattggggaaaaattggaggcaagcatagatcttggggcccagtgtagcatgcttttttctatttttaaatttaaaattgtttttagagatgcggtatttctctgtcacccaggcttgaacccctaggttcaagcaatcctcctgaatagctgggattacaggtgggtgccacttcacctggctaactaaaacaaaattcttttaaagatatggtctctctttgttgcccaggctgatctctaactcctggcctcaggtaaccctcccacctcagcctcccagggggattataggcacaagtcagtgtgcctcacttccttcaacattcttaaatacatcttggaagcacagtgtttattaccttgtttctaaaagagatgcatctattgtaatcatatttataatgttcttatatatggttttcattagttttactgaaactctcaacctattgttttttgatgatgactaccaatattcattgattcactgataatctttgtaatgtccttaactcttagggattagatgacattaaatctttatcaagaagtggattttgttacttaagtattttagtagcaacaaaattggtcacaacgacattccactgaagcagaatagtcagaaagcaatccaagccgcagaaataaattaggttgagcaagactacacctaatggcattgagataaagaccctactcctgactcactgccccgtgttctagtggtgtgcctgctctgcaattctccttaagttgatgtgcatctatctctttaggaccagggggtatttagtctgtaatggcttttccggcaacgtgtctcatttcagctgcttcagttgtcgagataacactctcgtcactgcctctctgatggtttcccattcaacagcagtcatttcatcttgggacacttttcctcacagtcaacagtttttcctttgtgtaattaagtctcatttttttctggatagatccatttgtgccagaactcttctgctgccttgaagcctgcaccattcagttatttttagtgttatctctttcctttcattagcacagagctaaattgtgcatattttgttctttcagctttatacagattaagatcttctagctccttagtcattcattttagctgttgcattgaatttcctacagttcatttaaatcacccagttcagtttaatatgcccagaataaataaagcatcattttttttcacatctaatcacctaccccgaccaatggcaagtgtaaggattataaacctttgtgactttgcctgtttactcccttagtaggtgagctctgagccaaaatataaattcattaaagtttttcttaatatctctagtctctacttctggctcccttccctcagggtattatcccctttacaaatatttttttgtgtctttaggtttccatttgttttttaaaaatacattcttatcaaaacgggaaaatattttcccatttctttcataaaccatgttttctcaatagttatctctaatcaaatacaagaaacagggaaataggtagtgccttacaaaggaattttagccatatacgtttggataaggtgaattttccatatcctggagatggttttgagtactcaggaggctacatctgaaaaaaaatatatagttattctctatctgggagtcaacttaattcttttgatggaaaaatagaggctgtgaatccccagctccagctggcagagatcactttgctcagaagttttgcacgtaaaaagaaacttcttttctgggatcactgatttatttcagctgtaccctgaaactggtagtcagatacaccctgtaaccagcagatctgatattctccagccttttcgggcttgtacatcaatcgtttaaactacactataatggggatcatttgccaaagctcattgccattctcttctagtcataccaatttataattacttttctctcaatatgtacccacgactctcctttcttcacccttatgatatttattcaaatattaaatgttgccctttttttctacctttattccaaatgccttagaggtctggcgtaaactatatggctataacctattgcatttttaccccatagatggaaaatgtattggtgaattgtttataaggttggaagttcccctgaaaataaaatccacccaccccactaggggagtacggaaactatatataatatgacacacatcgctattacttttattacatatgcttattatttattgttcaaattttcaaatatggtcctgcacacaggcaattttcacaaaagagcagtatcagtgttaatcagtttgaaacaggaaaggatttgtgaccccaccttacaaaatacaattccttatggttacaaaatctcattcaaatggattctattgtagccatatcaataaggaaactgatctatcagccaaaatcggaaatagccctgataaagtagactgagcttacattcatgcacagatgtttgctcattatttttacttgataaggacagatacgtttgtgtttagcataatgcgtgtgtgtatatttgaatagattttctagaccctcattttagttctagtaacaattgtctggttctgaatagggactttccactttacagaagcaggcaaaatttaatttgtcatagctaccactgaacccatttcctttatatactcaatctgctttgacacagtagatattggagtttcaaaccttaaaatgaaatacagctttatgatgaaatataagttgatatgaatactttcaatatacctatattctatgttacactcagttagctggcatttggtcttcactcatggacattttaaaaactcatacattctttagtgtttgataatgtgacaaatcaaccccctataaaattaactttaaatcaattgatacgttagcatgtgagtatatgtgtgtgactatgaatacatacttatataagcacacttatatgcttatacgtttgtttgaatctctcactgaccttagccataaaaacacttttattctgttgatttatacctcagcctacatgtgaacaaaagattcagcaaatcagaataacacagttactctattttctaatttatttgtaataaatatgcattacctgcataacgtttacatcaatatgggcatacattacttatgcaatgtaatgatctaaataacgcaactatcgacagtaaccacgcactctccccctagcaattacagaatacagtttctctgttgcacaacatgcctgactatcgtaaatttagggttatctccttattaggattccatttacactcttaatgaatcatatttattttatagcagcttattagtaaagttgactgccaagatataggcaatacatacaatttcctcaaaaactggggctttcactgttaatttaacaaacctatatgaatccatataatatatgaatcatatgaatatatataatatgtaataagataaaatgcataatttaacatatatgaaatatatatagtattaattgttaatatgtattaatatagtataaaataatatatataataaatgtataatatataatatatgaatcatataatagaaaaatatatgcatagacttgagttaggtgtaaagaatggaaaaattaaaaaatagtgcacttgatgagttcacaacctagtatagtgtgtcatagagaatgtagcattttgtgtatgcaatagtaaatatatataatgcaaaagaaatgaatggttttgcttagggtaggaggaatggggtaatatttgagataaatctcaaagcatgtaaagatttatcaaatgaagaattggggttatggaggagtaggggttgcattccaggagggagggaccaacatgtacaaaagcttaaaggaatgtaatttcatagtatctgggaaggacaatgggtagctatatgtttctgaaatcttgaatgcttgggtgaaataccaaaaatagggctagaaaagcaggttatgattagattgtgaaggcatttaaaagcgtcttgattagttgggaaataatttctacaacgttttagttgtataaataacaaaagcttcttttaatccagatacttagtggaagttcctctttctctaagtagaatactagacctaataataataataataataccgtatcatatatttttattacttttttggttttctgactactttcaagtacagagatggtccccgacatacagtagttcaacttaacaatttttcgactttaggatggtgcgaaagtgatactcatgctgtggaaaccatactttgaggacctatacaactattctggttttgactttcagtatagtatttaataaattacatgaaatattcaacattttattataaaataggctttgtgttttatgatttttttcccaactgtaggctaacgtaagtgttctaagcatgtttaagataggctaggctaacctatgatgtacagtctgttaggtgtatcaaatgcattttcaagtttcaaaatttccaaactatgatgggtatatcagcatgtaacttcattgtaagttgaaatgcccatcaaagatagactggataaagaaaatgtggcacatatacaccatggaatactgtgcagccataaaaaattatgagtttatgtcctttgcagggacatggatgaagctggaaaccatcattctcagcaaactaaaacaggaacagaaaaccaaataccacatgttctgtcttataagtgggagttgaacaacaagaacacatggacacagggaagggaacatcacacacctgggcctgtcagggggtggggggcaaagggagggatagcattaggagaaatacctaatgtagatgacgggttgatgggtgcagcagtccaccatagcacgtgcatacctatgtaacaaacctgcacgttctgcacatgtatcccagaacttaaaatataataataatataaaagaaaagtatctgtgcttgatgggttttgatatcctcagtaactatggccaattagttgaacatggcacagtattatccatttgcagtagaggaaacaaaggagaaaccagaggaacagtgagagagagagagagagagaaagctgctggtcatgtcctctttccagcatgtcaccctccatattcttcttcaaatcaaaaaacgtagaacggaagggagcttagtagcattcagctctgctacactgcacaccagctatacacacaggcaatcaatatggtttggacacagctgatataatttggtggagctctaattgaatttttccccttcttaatataattacacctacagaacgtctccaattaagtgtccccccatcagtctcaaaattaaatataccaaatggaactcattatctactcccacataaaccagctcttcatgactctttcccctttctattaagcaccactgcttccaggctcctatatctgaaatccctgaagtcgcttatttttgtattcctttctccatcccgaaatccattcagtcactgaatgctattgactaatgtttgaaattatatctatgcataccttcctttacgttatgggtaaatgtttttggaatgtgtttaaacagaacaaggaattggtgaacaaaagaataaagccatgcataaacaaatgtttattcaccgttttcattatatttgtttgtagtactgcaacctaaagtttgtaatgtctgagaatatctgattgtaagcaattaccccaaccccatgtaagttaacagtgttataactggtacgtctccttataggtgaatttgttcaaagttgcttaattatattttaaaaatctcttattttagaaagaactctcaattgctttactctgaataagataatactgtttagaagacaaatcattgcaagttttacatctgtaagtaggttacctgatgaaacggattgaaaaactgaaggcaaatattgaatgttagattattcccaggtatctgacttcatcttcttacttgctaggtgtcattgttaatgataatttaaaaaatcacacatacctacgtatccacatatacaaaacagtaagcagtcatgctattgaattcacaaatatacaccaaaagacaaggggaaaaatataaacaacagctttcttactagcaagcagagtgtggcgtgaggtcaaatttttatgacgaagagcatacatattcacaaagtaatttatctcaacttatgtagctggaaatggagttgatgggttctgaaaaaagcttctagatgacattaaaaaaaggggttcttatgacaaagaaaaaaattacctcaaagtagctttcaaagagatcgaataaagtcatttcatgaaatgcgagactaaaaaacatgccagcatttctaatatttctaatgttttatatgatataaatatgaaatataaaaatatttaatatttttatcatagaaaattaatggcatcaatttcttatcaaaatcatgcatacaattgattatatatatttgctaaagtcctaaaattttgtgtatacatgttggcctaaaatatttttgagggctcacaggcatattttcttttgggaaaatggaaactgcctaatacatgagatgatttatatacatgctgcattttacaagcggttagggaaacacatgtctattttttttctaaatcaaataatccgtgtgtgcaccatgctaccttgaatatcagattatcagatttaccatccctattagggatataaatgttccagaagaacataagagcaaatttttagaaagattaatacagaatctaaagattgaagggataagatgatttacattaaatctgtttccaggatatcctagttgggaaatcaacctaaatacccgaaaacttaaataatccaagacagtatgcatttgcttaacagactttttctccatcatttgtctgtgtttagtaagataaaagaaagacttgcggccgggcgtccgaggcagcgggtcacctgaggccgggagttcaagaccagcctgaccaacatggagaaacatcatctccactaaaaggcggaggttgtggtgagctgagatctggccatcatactccagcctgggcaacaagagtgaaattccatcaaaaaaaaaaaaaaaaaaaaaaaagaaagaaagaaggaaacttgctacccctcagtaaacaagttatatttccttcataactttcttcctataaggcaataaacaaatatttattaagaacctatcatgtgccaagtaaataagtactctgtcaaaacaagttagattcagagtgggctggaatgatttggacagaagggaatgtgagaaaggctagataagatggaaacttttctgccacaggcataccttcccagtagacgaagtagagatacaaataatgtagcgaagggtactatggaataaaaaagtcaataaatttatttatttagtgattacagctacgatttgctaagcaattaatatatgtcagacattaagccaagacctctgcagatgatgccatgtttagatcttataacaacctagtaaatgtgttaggatgatcaaatccattttattttatttaaattaaatagttaattttaatggatagaaaaaattgtttatctttatttcattcaacatgttgttttgaatatatatatatgaatggctcagtcaagctaattaacatatttattacctcacatgcttatttttttgtaggaagaacactttttttttttttttttggagatggagtcttgctccgtctcccaggcaggagtgcagtggcttgatctcggttcactgcaacttctgcctcacaggttcaagcgattctcctgcctcagcctcctgagtagctgggactacagcctcacgccgccacatcctgctaattttttgtgtgttttagtagagacggggtttcactatgttgcccaggctggtcaggaactcctgagctcaggcaatccgcccgcttccgcctcccaaagtactgggattacaggcgtgagccactgcacccagccaagtgaaaaacacttaaaatctactctcttagcaattttcaagagtataatacattgttatgaaccacctgtagaatcaacatgtacaatagatctctcgaacttatttctcctgtctaaatgaaattttgtattctttgatcaatatctctgcaagcctcacaccctcctcccagtctctggtaaccactattctactctctacttctatgagcccaactttttagataccacctataataagcgagatcatatgttatttggctttctgtgcctggcttattgcacttagcaaaacttcctccaggattatccatgttgtcacaaatggtagattttcttctttcatgtctgaattatattccattgtgtgtgtgtgtgaccacattttcattatccattcatttgttgatggacatttaggttgaatccataccttggctattgtgaacaatgctgcaatgaacacgggagtgcacatatcttttcaatataatgatttcatttctttgggatacatactcagtaatgggattgctggatccatactcaatttaaagatatagaaaacaagccataaatatttatgtcccccaatatccaaaagttaatcaatggccaaatcagcttaatttgtctgttttgtttttactatcaaacttaatacattcaccaatgctctttttcatagttgtagccttttcttgaagattataacgtttagtagtttagattgttatgtagacatgtggtgattaaagtaactcctgcaattaatttaactaattttagttatcatgtactacacttttacatactatttccctcaaaaatgttaaaaagcctttcttaaagcctttttagcagtgccttttatatttattcgtgttactgtttcatcaattgctttagtttggtgacagtttcatgtagttcatttactggattcaagttacagtccagttacttgaggggcccaaaagttaaggacttctgaaagtgcgtgaattgcttctactcactgatgcatcccaaacattcagatcttgttacctgaatcaggggttctattctttaaagttccttggaggatactatcagaatgaaaagactcaaaatagaagtcttccggaatacaatgttgtggttttaaacttaaaagtattgccagtacaacgttagtatctactgaggtggtcacactcattccagcaggtcacatactgagaactgcataggctttgtatggtaggccaaaataactttcagattgagtccatcaattatttttctaaaaaaaaaaaaaaaaaaaaaaaaaaaaacccagagtttttgaaaaacctacttagtcatttggaaaaatactatgacattgaaaatcatattcctggaatccctaaacattattaccaaaaccatcggccacagagctgtcttctactttttccccaaccccactaattccgagtgtatctgttcttaatattcaggttatacttaatattccatcttaatattttattttaaacacgttttatgctaaaaatttacacatatatttataatgttctttctttggggatatgaggattctactgctgacctactgctgaagtactaaaaaatagtacttcagtgtgtacagtaatagggttgagcaatttattcatgtcccagccaatttccaagtatccacacacatttcattggcaaagtattcatatccactcatcagagtttgtaatgtaaactgtttctaaagaatattttctcactctttcagaggagaaaatcagtgtattttaaaacataaagctaataaattccatcacacagaaattaacttcaatagggctgtggtttgaaatatgttgtaatccactgaaggaactcaggtaaaactagtaggttagctaatatttattttttatttttatctttaagggacaagatctctctctggcacccaggctgaagtgcagtggcatgatcatagctcactctaaccttgaattcctgggctcagatgattctcccacctgcacctcctgagtagctgggacaagtgcacaccacgccctgctaattttctttttatttttcgtggagacagggtcttgctatgtttcccaagctggtctagaactcctggcctcaagcaatcctcccgcctcagcctcccaaagtgctgggattacaagtgtgatccatcatgcctggtctagctaacatttttcttttttcttatttcataaaattgagactcactttgcatccatagacttatggaaacattttgaatccagatgccgtagccatttttttgtttgttttggtttgtttttcaatatcaatagaatcttttgtaagcaaaagaaagcaaggacttctttaataatttctgatttttatcgtggcatttcctcactctcctcatgccagcatagtccaaagttgctatttgctcaacattattcaggtacttaaatgtttaaacttgatagtttttaatgcatctataaatttaaacataattctggaaagcttcattttctataattaaaagtgataatctatcttattttaaatgtatttctgtcttgggtatcttttcctaattaaaatttaaactcttattttacaatgagacgttacctcatttatttttcattaaacaaataaaaccagacaatccctgaaaaacctatgaagaattatctttttaaaaatataacaaatccatgtgatgaaaactatctttttacatcaccactacacagaaagtttttcatttttttatgtaatcactattaataaaatcatccatgtaggacaataggcaattatcgttaacacctatagcaaagcatagataaagttgattttttgtttttgtttttgttttttttttaagatctcacttctgttgcccaggctggagtgaagtggtgcgatcttggctcactgcaacctctggctcccggggttaagcgattctcccacctcagcctaccgagtagctgggattacaggggtgtgccaccacacccatctaatttttgtatttttagtagagatggggtttcgctataatggccaggctggtctcgaactcctggcctcaagtgatccccctgccttggcctcccaaagtattgagattacaggtgtgagccactgcgccccaccctgacaaagatgattttactttatcttaacctcatcctcataatggggtttgataattacatttcatattttgatcacttaaaattatttttgttagtagcattagtattttgtacatgaggaaaaggtgctatgtaaccatcaaagtacagttctctttctaacggtaaaagtggttgtgcaaaatgtagcagttaatgtctataaataggagacatagaattctatgtttctctcaagaagaatttctgttaaaatataggaaaaatatatcaattcatatttggtatttatgtagattatgttatagtactcctattttacttttgtaatttaataagggaaaactttttaaaatattcattcagtgagtaactttattgagactctacaatacagtgtaagatttatataccaatactacaaccattttactgacagaaaaataaaaatctagaacagtttcagaaatgctgcctttttatgctgttctccccaaagcaggggtccccaaagcaggggtccccaaaccctgggccccagaccaatcggtccgtgacctgttagaaaccagggggaacagcaggaagtgagccccgggcaagcctgagctctgcctcctgtcagataagcagcagcattacattctcataggagcgagaaccctattgtgacctgcgcatgcgagggatctaggttgtgtgctccttatgagaatttaatgataaatgttgtaatgtgcttgaatcattcccaaaccatctccccagcccaagtctgtgaaaaaattgtcttccacgaaaccagtccctggtgctaaaaaggttggggaccacttccctaaagcttagggggtaggtctaaatattttctcaagactcctctaagtaaacacataaaagcataattttaatgaaagcacttgtatattactgcaaatgtgatacctgaacttttgtttgcttgctttcttgtttgttagcttttgagaatacaattgtttttattacttagagagtatacattgaaggaaattataagaattttcatacttgaaagggacaaaagaatatgcaataggaaacagtaaaaaaaaaaaaaaatcatgtcagggctttcaaacctatctgcagaattcctttcaagtttcagtcctttgggggagccttttagctctctgcaccctctccttctgcttatgtgtaagccttggtgatgcatttaccaaacccttcatatctgtaatcatgaggtagcttttctccttcattgtaaatttagggatagtagaaactgccttatttaacattgtatctcttatataaccttacatgtaccatacatacatagagtctatgggataaataaacgtttatacaaattaaacatgagatggatgaagagataaacggatggatggatgaatggatggatgggtgcatggataaataaataaatggttggatgaatatgcttataattatttctatgtaaaatatttttagtgttaatgacccccaaagtgctcttaaagctccaattacctagttaattgcacatagtacaaaattcatagaggtaaacaaaaaagaacgcataaagaaaattgtttctcctattatgttagctagcctcctagttatcctccttctctcttactgggggtgctggcattgcggttttctgtgtattctttcagatatctgctgtacatacatgcgcatagtcatacacatggccacgtatatcagttcaaatctgtcaggaaggtatgagaacatcaatttcctcataccataaaaaacgcagtatactaccaaacttttgatctttgccaatatgattggtgaaaaactatgaaactatgtcttttagtttgcacttatctactcaggaatgaggatgaacatattttcaaatatttaagagcaatttttgttactttttctctgaattctgttcgttttctttgcaagttataatattccttccaaaattgttttataaccagttgacagatgggaaccagtctctaggtggtatcagaaacagtgttatccagcatattcaaacctaccaacttattcgatttatcactatagctaattgtttgagtagttcatacatttatttacactatcaagaaaaacagtttcaacattcttgaccatatttaaaaatgccttttaggctacaaaggtagattgaagagagaagttccaaacagtaatgaaggcctctattccatcccagggaatttgcaaaggctctttcctggacaaacttgtgctattattttgcatgatggaataattttcatccttcaaatctgtttaattgcacatccaaaaaaacaccttctttgactatgaaatccagactagttctctctccttccctggactctctattttaggtactttctatctgaacatcttgtttatttcttcaataacacttattatattgggtgattatgttattttgtcatttatttgctattccctacaatagattggaagttccatgagagtagtttccttgcatgtcttgtttactgttttatcttcactgcttgatccatagtgtggcatgaagtaaacattcaacaaatatgtgcggaaggaataaatgaacatacacatctaatttctggtgtgtttatcaaaaattcaattgtatacttctggtagactgaatttaattcaattgagtttttcccatgtgtgataagaaggatagggaaagggacagatggaggatgagagggtaggagagaagaagagagaaagagatgggagggaggagaatgtagactctccaaggagcctaggctttttactgcatttatttattcacaatttactgcaaatgaatttcacagacacagaaactgcaagcttagacaccatcattgctctgagacaaatgcatccagagtgtatttgaagttcagatataattgatagataaatgtaaagctgggagaaatttattaaaaatgattggtaactcataactttcaaggaagtgaattgtttaaaaaatgtacataatacttgggttagatactgtgtttcttagttaaaatataataatatatgtatttcaatagatcatatatgccaggagacacctgggcgtattgactattacataatagtgattatctttatccatctagtgtttgattgaggacggaggttgatgtatcaaattaaattaattgagatctaagaatgacatcaataaacaaaatgttaagtttcaatcttcctttttgcatatgtactgctttaatctttcggctattgatcaccagttatgtttgcaaagatcacatttaggctttcctttacagagagatttaacttaccctttaaaccatgagtcagtgcttttagttttggggatttagtttccttaaagccctctgagggaaagaagggtatatatagttatatatctccagagaaattgaatatcaaagtctatataacatgtaatttatcaatgattattaactcctgcacttgcctgtgactgcctgtatttggtgatgaagaaaatatagaaaagtagatgattagaatagggaacctaggaaataggaattggaatgtagataatctacagaacaaatggtatcttcttttatttcaattgtcatttgaaaaactttctttgaagagtaaataaaatataacaaatcgggactgaattcagtagaatagactgaatactactaaaacataaaaaataaaagagctaaaaggtaactttaaggtgtagctttatgttcttacatttatggcatgagtgcaaggaaaggctcaacagttacatgcatccatttactttatagttgaatagtaaaaaataatgcagtgaaaagtaatacttcctagggatgttcttagacatgcaacctgatcaaaaaagtataaaacaggttggatagtatctctggaatctcccattaataccaacaatgccttttcatcaaccaacactatttgccatagtcttctcaattctatctggacttcctgattttgatcttttcaagccaatccttttacacactgctctcagacttagtcatctaaagggtctttgatgatctccattgtcttaagttagaagtcctaagcctggcctacaaggttctctattttttgtcattttcctattttgacttatttcctccactctttgactgtcctacttaaactttaaggcagtctccttagacctggaatgctgtttcccactttctcaacctaccaagcttttgaacgtcctttgggacccagacaaaatctgatctttgccgtgatacatttcattaattctctgaggtggaattagtctccctttcctttgattcttctgtagcacctgtaagaacctgtacaatagcaggtatcatattgcatggtaattattttccaaatgtccttctcctcattccaattatgtgtacttcaagggccaggacattgaatcattgtgtgtatcctatgctggaaatatattaagcttccatagagttctcatgtaaattattgtgaaacatttttaatgctatgaagaaagcattttaaatctgtttaagaatacatgttgaccgggtgcagtggctcatgcctgtaatgccagcactttgggaggccaaggcaggcagatcgcttgagcccaggagttcgagaccagcctggacaacatggtgaaacctcatctctgcaaaacccacaaaaattagctgtgtgtggtggtgggcacctgtaattccagctacttgggaggctgaggtgggaggtttcacttgaggcgggaggcagaggttgcagtgaactgagatcacaccactgcaccatctgggcgacagagtgcgaccttgtcacacacacgaaaaaataatacatgttgaaactttgggaaggttttgaagcaagttttgattaaataggacttagatttcaggagtcagttttatcttcaatgcactcaaatttttcagataataaaattatttaatatacagtcatactaataatatagacccttgcaatagataagttggtgtgtatgcgtatgtccaacagaggattcctacagtcacatatattttagccataaaataggaaatctaaataagcacctttgtcttagacttcagcacaataggtcgaaccttcatttgaatgtgactagggactgccaagtccctactgcctatctctaccaaaggctgatctggaagtgaacccttttctttctttttttttttttttctagcagatgaatgttattgagtttatctgtggtctagtgatgatacctgcagagcagcttcatttttcagagtcattcagaaagctatcataagcttcttccttcttgtcaggcagagcaaatcctggcatgacaggatgtactgggagtctccgatagtgggaactgacaaagatgtgccttcagcactcccacaaagccatattgtctttctggaaatgaggaggatttattcagcaaatctaagtgtaaactaggagacccatcagataaaatccatacaacaaagatcaccaaccattttttcttcttctgaatagagccagaagatgcaatttaccttcttctctttttttccccagaagtgacaatatagagttagagagaaattatagagcggagattttgaaattcagtttcctccccaactaccagttgaaaaagcatagccttaggaaatgttctcatttgatttcctatgttttataacatgttatgtttgtgaatttgtgtgtgatgtgtggtggtggtggttccaaaatatctaagatatatagtaaatgagcaaacaaaaatagtttgtagcttttgatatatcatagttgtacatattttcgtgttacatgttgtattagttcatttttacacagctataaagaactacctgagactgggtgatttataaagaaaagaggtttaattgactcaaagttccacatgactggggaggcctcaggacgctgacaatcttggcagaaggtgaaggggaggcaaggcacatcttacatggtggcaggagctgggggatgtgggggggggggaagtgccacacttttaaaccatcagatctcgtgagaactcactcactatcacaagaaaagtctgagggaaatctgctcccatgatccagtcatctcccaccaggtccctcccctgacacaaggagattactatttggcattagatttgggtggggacacagagccaaagtatatcacatgtaatattttaatcatgtatatactgtataaatgatcaaatcagagtaattgggatatccatcatctcaatccttcctttctttgtgatgggatcattataattattctcttctagctattttgaaatatacaatgaattattgtttattatactaccatatactagaaaaaatgctctttaaacctcatcagaacacttgctaaattgtctttctatatgcttatgacaacagtaaaaaacaaagatcacatgtccaatattactgggctgtgcttggaaaaaaatattttactcttttttaaactttagccaattatatcttcaatagatatcaacactaatatcacatctttaaaaagtttctatgggttttagtaaggtatataaaaccatcaaatatattatccagagagacaatatattgacatttaaaatatgttcttactcatttatggtatcacctactgtcagaggtaaagtaaatttaatgatgtctaaagggattacagttgcttaaattggctagagttttatatgatttatattttcattcttttctggacattggaatcaagtagtaaattttgaaattttatattatatttttacttatcctgtttacagtatcacacctgactcaatttagagtagaaaatatttctagttacccttcgtcagaatataaacatcttttcaaattcatttcagcattttaattgtgttaatagaaatagttcaaaaatatagcataaacctcagcatgttctattttggagagaaggaggacaatgattgttgactctgatggatagtttcccaatgtgaaaagagtaaatttttcttcataataatattttatttcatttcatatggtactctaaaataggcaaaatatacctttacctctcttctgaatactagaagtagaagtaaatgattttattattgacattattaattatactatatttatgttgatatgatgccttacagttcatcaatcattttcatatattttaattcatttggccctaatagctgtgaccacctcccagaatagcccagtcaaaagaggttgaaaagaaaaatcatacaaaatacccatgaagtttaagaatttatggcacttgaaatatttgcccttagacaatgttcttagtatttctgagcctcagtttttaatacatgaataagaatactttaagtattattcttccacataatgggaataagaatacttactccatgaaatgagaataagaagacttactttatgtagctactgagggagtcaagtgaggaacaattactaatgccatgacacagtgtagatgctcaatactcatcattcagtttccccttttgaacttaaggccagaaagaagtgacttcagtggtggtactaaggagagagggggtgatttagccttcgcttaacattcatcagacctcacaccaagccacaggaagcaaatatacaatctctgaaaatagggaaacctacattcaagacaaatcctgtgtgtacctcctccccttcctctcccagaaaagatggctatgtctgaatcacaaaatgtaagcggtcgcctaaaaattcagaaatcaggataaattatattttacctcattttaacaattaaaatcaatgcaaaataattcatatgagcaaaatattaaaattttaagagaatacaagatgtaatcttgcattcgtgccactcatgttctctggcctcatccttatctccacttaaccaccaactgaaggactagaaagttggcaatgacataaagcacagcttcctcatgccatcttcccatgtccccccaactttgggatagtaaacattgcctgaatttataatcctgtaatatttttaaatgttttatcagatacatatgtttcaacaatatttgttccagtttagtgtagcaggtaagactgtgggtttcagagcatttccacctggatttgaattctgtctacactaattactggatatctgaccttgggaatgttactgaagttctctgagcctcagttttctcatccaaaaaaaaaatggggacaataatagtaaatatgtcatagggctattgtgaacatatgtgagaacattaaaaatatttactgtatgacacaaaatgttttagtttgtttttatatttaaatgttattaaaaagatatttgggactcatattttcctcatgcatcatcccatccctagaatttatcttgattgttttgtgtagcagtcgtttctttgactactatgtaatcaggttaactgtccattttcctgccagagggcatttgggctgctcgaagatttttcgtttattgtgttattttgggcagtgctgctaggaacattctcctcatgtttccttttgcaaatgcctctctgtttttgatgttgcagatggattttaccttgccatggcatgaaatccaaaggctgtacccacagattccgatatttatctcttgcttgtccacacctagtaataaactttagccaaagcaaactgttgcttgttactatgagcctaaagtcgctgtgctggtccctcctgaatccttttctatgagtcgcttagtactcttgctctcaagctctggtctgtaccgagctgacagctttttttatttctaggactttattgctgttttaaagtctttccactctgaatctgtacctattcaccccagagttagttgcatttctctgtgtctctaacctgagggtcatgagtctgactttgctcagtgaaggcaaatattttcttcctctgcagtctgtgttcattttgataatgatgcttgatggggggactaagcatccccctgagaggaaagaatctcgtttggattgtaatttgtcacagtttgtcttagtttggatttctttaaaagctaagcctgaggcgaggactagagagcaactagctcatttggtagctgatcacagggagcacaagtgggaggcaggggaagtaaggaaaaacgggggaaaacaatagtgagtgtattattcagctggctactgcagtgggaaactgttgttcaatcctgtgaagacccctctgaggaatgctgtagaatgtactcataattgtccctctgaagaataagaggctggggaatatgtctctggttcctgtgcctcattaattatttctcagggacatcaggtcccctcctgtgtgttggatgagtgagtttctataactttggacaaagtcgtgaggctgaaacacagagaagcagtgggtgcttgacctggtgggctgttagcatgcccgagactctccattacagggctgatcaagccagaggtaaaccaacagagtgggcagtgtctgctacacagttccaactggatttcccaattacctagtgctatggtcttctttgacaacgtgtctcaagaaggtaacctgtagctctagcccactgctactgaatgtttcatacctggtatcatgtggattataactgtagtatttcatttttcaggtattgtagtatcgaaaagccctatagcctgttttccttagtataaattttgattaaattatgcaagtccactttaaattcacagtttgatgttatgtacttaggaggcactcaataaatagttcttaaagcaataatttttaaatgactttttgtattatgtagacacatattaactataatagagcccttcggcaggaaaactgtttcttcaaagttgcaaagtgactgacaacgatatatataactagaagcttcaagaaaaatgttaccaggggccacttttaaactagggggaaaatcgtttttcacaataagctatcccatctcctccctactgaagcctctgatctgctatgattattaaaccctcatcttttagtgcaagaaacccagcaagctgaaagggaaatgcttttcagatttaaaaaacaaaaacaaaaacaaaaataaacttaatttcttttaggttgatgttgttatactaacttgccaatcagttaaacatgtatctgtcttttaaaaatatcttattacataagaacaaaagattttaagacatacagtttcaatcataaccaaatgtgtttattacttcgaattttccacagtaacttgaagccatctatgtacccatctccaattccatcgcttccccactaccaccagagataacggtggtcgtgaaatttgctttgttttatagtcttgctacatatatatgtattactaaaagagaaatagtcttgctctgcatgcttttgaacttcgtatagttggaatcatattgcatttattcttctgtgactgtttctttcaatcagcattatgttgctaagattcatccatgtctgtgactgcagcattatgtcatattccgtcatagaaataacccacaatttatttatgcatactactgttgatggatactagggtcgtttccagttttaattcttttcctattacaaacaaggttccttgtatacatgtaggagtgggattgctgggtcacagggcccatgtatgtgccctctggtatactctttggctcctttacactgctctactgtgtaccactgggagactgacctttgtagactgtgtgtgccaggcttccatttccaggtgacttccagctctctttggctgatggtgaaggattggaaactcagggaagacacaagagtgcttctcttcctctctttgtgtttcaggcagtatctttggcaacagctgcatatgctttgatgtcccccctccaaccagataggcccactatagctgcagcttccaatgaatgatctcataacctcattcactgaattcatgcaccctgccttcttctttcctcctcctccccattccttctcctcttcctcctccccatcctcctccttctctctctctctctctctctctctctccccttctctcccactcttcttctctcctctcccttcctctccctgtactttaagggtaatagtggcttcctgtggttgctaaactctgagtcactttgtcctccacagcttgtcaactctgttcttctctcatttgtttcaattctataatttaagctttctgatttaaatatcaaatgactttttgtgtctgcttagattctgactgacatgatgtatttctaagtttccaagattatgccaaattatttttaaaattggttacaccaatttaaattctcacgaacttaaaaattctgcttgctcccaaattctaacacttgacaatgtcaaacttaacttttggctactctgttgagtataaaattgtttctagctgtggatttactttgaattgcattaatgaaaaatgagtttgggcattttttcatggttccattggcaagttttaaatgcagacaattgtttagaatacattatttttatttaataaaactcattattaaatgtatattcctttaaggctgtactttgatttagtgtaagtagtacacaatttacctcagttttccgttttatgtattcactcatttaatttagcagatatgaattaagttctacaatatactatacagagtttaatgtgaaagtaagaaatcagaacatgttatggctaggataacttgggagcacagccttttgaaactggtttagtgttaggatacacatttttgtgtttacctctctttcccaccgccagtttcaccatcattcataagatcaatgactgtggtacattacaaatataatgtgaaattgtttacaagatttagtattgttcaatcattttgcaggcactatcatggaccttcagtgtcaataaaggattcagaggttccagaaaattctaggctatatcatgccttgagaagtcctatctaataaatatatagaccacttttagagtgtaaaggaattcgtaaaatgtgtcagcttaaaatattgaaatagcgagggtgacttttcctttccaaactgttgatgaagactgcagacagggataaacattagctctgtgtggacaggatagtgtctgttgtctgagattctggtcatactggtttaatacccataattgaaagagctctaagacatggctttgtggagaaagaaagatactacttgagagaaagcaagttcatatttccttttactaataagtgttcagattcctaaaatactgtaacagtaaaaagatattttgaaactttctaagaaagtgtgttctagggcggggcgcggtggctcactcctgtaatcccagcactttggggggccgaggcaggcggatcacgaggtcaggatttcgagaccagcctggccaacatagtgaaaccccgtctctactaaaaatgcacacacagaaaaattagccaggcatggcggcgggcacctggaatcccagctactcaggaggctgaggcaggagaatcgcttggcaggagaattgggaggcggaggttgcagtgagcccagatcacaccattgcactccagcccgggtgacagtgtgagactctatctaaaaaaaataaaagaaaaagaaattgcattctaggggtgaacatccacatgtacctgggatcaatccttccacagtcatatcttcacatcataattctaaccctaaatcatcaagaaaatattatgttagacataccatacataagaagggaaagagagctgtcctacataatcattttcatgtaaacctttcatccagaagttgaggtgttctgtcatccaaaggagtagctctcagctgtctggaaaacctttttgttcagaaggacatttgttgtgctttggtttaccttgggttttattgtgccgcgtgtgtgtgtgtgcaattctcattctattaaattattgtgtgattttgatacatttatgtcagggattagaaattttagaaatagattatttctggttttctgatcaatgtgtcctgtctatgtattttgtctttgtgcaaaggaataagactaaaacacaagttatatgcctgagtctacaactgagtgttgtaaaccaaaattccaaatgaaagaaagatatggggtggatggcaggattagagaattgaaagagtgaagaacaaaaggcttgcagacatcagtaaaatatgctttcttagttaaaaatagtaagaatgttttggaatattttacattaatttcgtttcccactttttctttacttttgcacaattaatgatttagtttttgagtttcaaatatttggccaagcttatctactgattgaattcaatttcttactggatgtgtgtactgcttttttgttgcattcatggcataaattttgtggacgcatttctacaaaaaccgtggattcagcatgttgcagagtactatggcaagaaaactgagtaacagactaagctgagacttggtagaaaatatctgttctcctacaaggcttgactctctactgttacttcaagaaaatattatgttaactatatgtgttatacttaagaaggcagaaggatactcactcctctgacgtggcgagatactcctcattacccccacggaaatactatctagattgtgaactcatccatagaatgactacatatgattcattttgtgatttccctaatatgtattgagtttaaactacattgaattccctggagtttgactagaaggttgattatccagtagagtttcttgtaagaaattcttatagcagtgaactattctttatggcagataaatcctacctgtgtatactgattttctttcttagtaccatagttatactcaggttactttttttttttttttttttttttgctcatatagacaagactacataatcctttttagaaagggccaatatcctatttggaataaaaacaaaacagttagatggtaccagggtcaccttaaattaacttatcagactatcaaccaaatcgaaatatgatttcagatgtaattaacccatttgcctagtgagatgcaaaggtgtgaggatttcttgaacacatctttctcttatgtagcaaatatcaacctcctgataccttttgtagtcagttcacataccatgacaatacatcctaaattttcaggtgtgatctaaccagcataggttcacataattggcatgacacggaatttttaaaatatcaactacctcaggaactttattcatgtgaatctggaagatcctttttggtatttgagccctttcatagattcagatgtcaaagtatttttagaatgggtctgtaaggcatcattattttgtaattataatcttattgattgacagcaaatgctgtgttccatgaaaatgttgcattgaagtgatcccggttagtgctaaagacagactgcttagatctaaagtctcatgagaagaaagaaagaacttaaaatcattttaaattcaccaatatgacgatacaggatctctcataaaatgctgaaaggttgtttttgctgccagacttttagcacttccgttttacgttcaaatgttgtaaaggttgattactcataagttaaaatgtttggtgcaaaatgtactttaaaaatattttcagtgttttttggaaattgtagacatttgattttgaaaagtaggccagaaatttggaagactacaagccatatgatggctgatatttcccatggaaaatataatatgcagctgtgctctgctgcatggtagaacaggagattaaaatatgagaaattataataccgtttgatgatgatattaatgtcactgaatcaaataaagtatgtgatatatcataagttaatagaacaacacttaattattgattagagcctacatcacattttaaattatcggcatgtttggtcttgcaaagggtcaagggtgactcgtagcaacagaactattctcctttcaaaaagttagcagaaagttaatatcaaattctatgaggtagagagggatttgggctgaggtaggtcaggaggaacgtaaagagatgtgtcatgtgtagatttgtgagctgtgggcacctgattttgtgtttaacagtatttacgaccaagataagtgaatgaagagctatgttcttatgaaccttaagtttattttgctaaaataagtaagaaaattcaaattcaaattaagctatatagtcttgcaaatttcaggtctctgaggggtgtgcattaataagtattcaaaagtattttgtcatttaattactattatatgaatttttatgtaattgaattattcttgaatgttgagaaactgtctttactaggctaaaaattcccttagtgatctcgttacccaattcctttgtgttccactctcagtgtctgaattgtcaccaatatgtggagtccaaattatgaaatacaaagctttaccagaattctgatgattttgaaggaagaaaattacagcaaattttgatcaattctctcctattagtgattaattcaatgaaccgcttgaatttcttatttcctcgtagaactgtatgtacatgaaggatagatacaatatttagtacaatctatagtgagatatgaagggaaggagattatgagaaaagaataaaactttattataaaaatgcttgttcataaagatttgacacaaaatcaatatgataagttttcagaaaatcaaacaatgaatttcgtatgaaacctcacattggcaaagcagttatgtgaataccaatattttttaaatctaaaacaaagcattttgaagtagtttcatgaataatgtactgaacctgtttcacgcaatgaaatgaacatcacagtgagaaaattattccacaattgtaaagttaagtgaagcttgcattataaggccaataatactcaatagggtattttctcatgaatttacactatagaatgtttttattctggaatttggatgatatcatagtcattcaacaaatacagagactaagtgatttttaaaatctttcaggaaattagttctttaatttcatctacatgtatgtaaaataaccaaacctatgtcttatgcatataatgtcattctaatatattgttcatgatcataatatttatatagaatccattttgcttggccgattgatttggcttggcctacaaattagtacagtccctctcaactttgacacttctgtgtaccatcagctccttcctggagtactgaaatagcatcctaactgctctctctcatgtagtcttgaccccatctataaatcctaatttcagcatttggagcaaccttttagaaagatcaattaaatcatctcacctcttcattaaaacgcctctcattctaccaagagtaaattccaaaccttttaaccttgacctacataactggaccatgcctccctcgcccatttcaattcagctttgctcttgtagctccaggcaagctagctctgtcttagttcttgcatgtaataagctttcaagtccctcggtgtctacttatttactgttccctctgtattagtccattctggcattgctgtaaagaaatacctgacactggataatttataaagaaaagacgtttagttggttcacggttctgcaggctgttcaggaagcatagcagcttctgcttctggggcggcctcaggaagcttctaatcatggcagaaggcagacggggagcgaggtgactcagacggtgggagcaagggcaagagagacagcaagtggggaggtgctgcacacttttaaacaaccagatctcgtgagagcccactatcgcgagaacagcatcaaggggatggtgctacaccattaatgagaaacaccgtgatccaatcacctgccaccaggccccacctctaacattagggattacaattcaacatgagatttcgtggggacatgaatttaaaccatatcactatctgactggaatgtgctttgctcctgcttctacttccgttttctgagcaatcagacagttattcattaactcattcattcattcactcactcatttgttcatttatgtattaaattattcagtgattctcaactctgggtggttttgccgtccaggggttatttcaccatgtccggagagattcctagtggcataactaaaagaagagatgtttgctactggtgtctagtgggtagagaccagggatgttgctaaacatgtaataatgttcaggtcaacccaccataataaagaatcatcttgtgcaaaatctcagtagcaccaagattgagaatctctgcaatacgtcaacaacccttctaggtgccaggaatatgacagtgaaccaaatgaatatggtctaaactttcacaaactaatccattaaggagaagatagtcaataagctggctaacaaacaattaaatgtatactttcaaattatgttgggtgctctcatggacaaggggacaagagagtggccagtgaaacctaatttagagcaggtggtgttgggggaggtggtgtttatgctaagacccaaagaatgaaagaaagactcagccccaacttatatatatagtaaacatttattgaatatcaatagcaaaaagttgcatttttctcaaccatgtctttttatggtaactggaaattgttcaaattattttttagaatcttttaatcatagattctttgctaaggggattagtctagcatttttctcttgtgagcaattaagttctcaccaagttagtgaatcctatgtcttatgtacttcctacttattactatgaaattatctaaaaaatgctcatagggttcctaatgtagttgaaaagcaaactgttgctgcatctctaatcagtaacaaaacttgtatttctgtcgcaaaataatgtaaaattttatagtactttttacatatttatttaaaacaattttaagtaagattgtttctttgtggaaggtcatatggtcccaatatagggatgtgtacagaaatacatatatacatacaacaacacaatgttaaacctagcaaaagagtggagtctctttcttttatttttcttactttttgagcaacgagacaagcaacatattatgcctagtcacttgaatcatacaccattaaaacattatgggctgagtgcagtggctcatgcctgtaatcccagcactttggaaggccaaggcaggtggattacctgaggtcaggagttcaagaccagcctggccaacatggtgaaaccctgtctctaccaaaaatacaaaaattagccgggcgtgtggtggtggatgcctgtaatcccagctacttgggaggctgaggcaggagaattgcttgagcccgggaggcggaggttgcagtgagcagagatccgccattgcactccagcctgggtgacagagcgagactccatctccaaaaaaagaaaagaaaatatgaaaagaaccatttttaatgtcaactactgctttgatgctaatgtctgtcagttcagtgtctatgacttaccctttattctgctcaaaaccttcttgaattttccatttgaatatcccacaggctcttgaccccacttatccaaaattaaacctatcttcctctctactacacctcttcttataatctttctcttgctatttctaaacatttagtgggccaaataaataccctaggagacatgacttgaaaggggtatgaagtttagataatgttcggcttcttgatctgatactggttaaatgggtgcattacatttgtgaaaacttattgagtcacttatgacttacagattttctctatatattttatattttaagaaaaaagattacatataaattctagaagccaagctacacctttccctcttattcatccagcacatttactgagacagctagattttcataatgactgtccattgttgaatatttgctatatctttgatattgttatccattattaacttccttacctggtttgacagttgaaaatttctgtggtgcagctattattatttccatttcacatatgagcaaaaagagacttagagtggttaagtaacttgtctaagttcacacaacaacaaagtggcaggagtagagtttgaattcgagtcaatatttataatcactatgatatcttgcttctcgtgttccagtcgcattaaaactatgaatgccactcccactccttatccatccttactacctggcttcactttagatcttcaggtcttctttcctatattataatgataatatcataagaaatccagtgcagtttagtctattccaaaatcagtctaaatactgccaggattagtgttcattccacaatataaatctgattgtgtagtttacttaaaatccattaacacagccgttagcaaccttagctacatgtgaaaatcaccaggctccacccaagataaattaaatcagaatctctgggtatgagggactgggagtgagcattttaagaaagctccctgggtaactgtaatgctcagctaggcttggaaaccaatgctttaacgtttccctacagcttttattataaaaataaacccctcagcattgcacaaaatgccctttgtaatttggtttttgccttcctctacctcgcctcctctgctgtaattcccttcttctcccactttttccccaccctacctacatacatttcattgcaattattcaaaagtctttgtttcttctgaagagttatgatttttataccatacccttacacataccagtcttcccctctaaatgcttagttacattatctttgtacttaatccttttagttgctgataataaatgaaaatttctttttagtttctttttttttttttttttttttgagactgagtctcactctgtcgcccaggctgggctgcaacctgggctgcaacctccgcctcccgggttcaagggattctcttgcctcagcctcctgagtagctgggactacaggcatgagccaccaagcccagctaatttttgtatttttagtagagatggggtttcatcatgttggccaggctggtctcaaactcctgacctcgggtgatccacccgccttggcctcccaaagtgctgggattacaggtgtgaaccaccgcacctggccaaatttctttatagtttcttgacttgtttttaatttagaaaatttcccacgtatatagacaccatacaatttataatgtaaagctgttttcctatatcaatcatgttttaccttttttctctttctcctatatatgctgcttcctggaagatctaggagctgacaagtgtctttttatcttgctttgcaaatctaatcttttgccatttctttttatagaaatgaaagcttgtatcatgcatactaaagatggcttcttctttgggctgtagggccatttaatgagttatattgaactgaatgctttataagagttcaaattagtacattgggatactcctatgccagggatggattaatatatctgtccacatatatacacaaaaatgtgtgttgctaatttccaaattagagaatacttattttgaattatcagtatctatgacatattttgcatgtggtatatatttggttaattaaactgagttaccacttgttttatcaaaatttggtgtctttctaaatatatcatgaatatttttcttctaatgcacctcgctttctgctggaactatagaaacactttgtaaatttttacttgtgaccactcgaacatttacaggacattttacctgaaaattttttctgagtcagtgaagaaaatgtccatgtttctgcgtgtgtgtgtgtgtgtgtgtgtgtgtgtgtgtgtgtgtttgtgtgtgtgtgatgcttgcttatgaggaatttattttggctatggttctttattttgctattgcactcttaacattcgtatgatatgtattattaccctataaatacttacacaatatattcttacaaaaattaatacaaagattggccaaaatgtaatagcatatgtttttgtaaatagaatatccatatacagtcataataaaactgaagagcgattttatacttttccataaagccaaagattaagggtgtaatcactgcttataatttactaggaaactataaaacagataaaagtagatgaaaggatattacaaatatctcaataagtcgtcctccgcaactgaccccttgctttacacatgttcagacactctatactaaactctgtttatttttctattttataattttctatatgatcgtaattcagcgttttcctataatattattagtagtgctaccaacagatattacattttatgaaaaattttaaaaagggcacatgttgcataaaactaggttttgaaacagctgcttataatgctgatatttagcacatgactaggtggaatatggactttttaatgaatattttttcaaagttaggtaatttctcatcagtcagtttcaaaagcaaagttaaaatttgtgtttcaaaaaactgggtatgtttgaaaattgtatttaataatggattttgagagttctcaatagcaaattgcttggctgactgtagtttaagaagtaataattttgaagagaagttgaatgcaggtactttcaaagtgttgaaatttttaaagaagaaaattaaccttttcagactgtacacttgttcatcttttatattcttttccctttaaaaaagaattgtagtaagaagggagattaccttctgtcattgatacaaattttccacagtataaatgctgtttatcacatttgtataatatacacttcctatcaattttaaaaattacatgttactactatttaactctgacttaattattttaaatataaaataattcattcttttataaataatcaaaactatagttttacttttctttcaaaatataccactgactacattacagattagattttttttagtataccaaacatattttcatcttttggagttattggaagagtagctgcttactgccttacattttagatttctctatataacaagcattttcatcattttggcttattcgagtaattcttaataaataataatacaatatttacaaatgagatgtcatttgcaattttaacacttcataattttaacaaaatatctttactttgagttttttactttccttttggtgtgacattttgacctccaatgtgatcttcatttaaaggaaatatcaacgaaaattccttttttttcatttgctatagatgtacatataagatttacatgtgtaaggaatatagagcaataatgaattgagctattcctcataatcacttcacttaagaaatagggggctgggtgtggtggcttgtgcttgtaatcccagagttttgggaggctgaggtggtaggattgcttgtgtccaggagtttgagtccagcctaaccaacatatcaagacattaagtctatgaaaaaattaaaaaattatctgggcatagtggcatgcacctatagtcctagctactcaggaggctgaggcagttgaatggcttgagcccagaaattcaaggttagactgagagctatgatagtgccactaaacttcagcctgggaaacagagtgagggcccttctcttaaagaaaaattgactagaatatgactaatactctagaagccctcctccacatgccacccttcccaaatgcaccactattctctcttcccaattttcatttttgtatttattattcctattcataccaacacaattttaccagatgtgtatgtattttcagcaaatatttttagtttattatgcacttaattgacactatggaagaacagcttttaagatattattccaacttagggaattttaaggaaataagacctttgtatataaaaagttaaataggaataccgatttgcttttgattagtgttaaatcacataagtttaaatttgtaggagatcatagagatcagaaagcccagtggttcacaaactttcttttttttatcaacaaaacctcttttaaaaatatatagcataaggaagacggaaccataaaactgaaattacagcagctcaactgaattgtgagtttcaactgaactcaatttcaaacccacaaataagtcaaactcttactttactgagaatatatttggaccacacagagtttaaaaaacatgtttaaatttatttagcttatttataccagaaccaatataagaatccataacattctgcattagaattaagtacaaacactttttctttctttctttttctttttctttcttttttttttttttttgagacggagtcttgctctgttgtccaggctggagtgcagtgacgcgatctcggctcactgcaacctctgcctcccaggttcaagtgattcttctgcctcagcctcctgagtagctgggactacaggcacgtgccaccacgaccagctaatttttgtatttttagtagcgacggggtttcaccatgttggtcaggatggtctcgatctcttgatctcgtgatccgcccgcctcagcctcccaaagtgctgtgattgcaggcgtgagccaccgcacccggccgtagaattaagtacaaacactttctatgatattatactaaattaaaaacaggaactcaaaatgatacaaactgaactgaaataaaataaaataatacagtgaatggagtccacaattaaaatacctgcaaggacctgaaagggaatggaaataggtgaagcaaagatctaaatgcatacggacattgtgtaaattggaaagaatactggcaaatggcacgcctgtgcccagtctaaaatgggcaactgctaatcaattcagtctagcagtgtccatgtcagaatgtagagctatttttggccatatattttatttttcaagaggaacttaagaatctggagttgtatgtaaaacatcccagtgcactatatatttgcctcataagttgagcacttttttttatgtgtgcatgttgtctactggtgaatcccaagcacttggaacagtgcctgatatatagtaggcagtgatgtatatttggtgggtaactggaaaaaggttttccaattaaaaattctgtgcaagcctgaggtaggagttgggcaggacttatttcccattcccagaggataaagtgaagaaactggcaggtaccagcaggcagcgaccaacggaagtgagaaaaacagcagaaaccagcagatggcaacaaaagtgatccccagcagccctcattgcatattagcagaagccactcccaccagcaccatgacagtttacaaaggacatggcaataacccagaagttaccacccctttcctagaaagttctaaataacctgtctctcaatttgcattaatctgccacttaatttacatgtaattgaaagtgggtataaatggatataaatacagtagccagcagcccataccctgccaactttggaggcactgcctatgagttgtccctatttcacaaagcgcagtaatgttcactaaaacatagctgtttaacgccactggctcgcccttgaattctttcctaggcaaagccaagaatcctcccaggccaagccctgattttggggcttaacctgtcctgtatcaaactagccaaatgtatctcaggcctgaattagatcaatggctaccagttcaaatcttttgttttagatattagagaggcaggaagtgactctctactgtgtagcatgatactcagagcccaggaacttcttcagaatcccagtttgacttccaaaacgccagtgtcttgcttttatttactcttgtgggtggcagtaagggaagggagcatatctccttagcaaaacatctcatcagaacacggtccatagcacaaattattaattaaagacttacgtggaggctcaaatatagagccaaagcataaccatttaacaattatccttcaaagcaattttattcttggcttttggtggaaaaaactcttaaaaataaaatgataattctacatatgggatttgtgatgctatttagcaaggatatgctttattgcctgacatcccctttattttggcagaatactatgagattctcattacgtttccatttgctgcggaaagtggagaaaagttcagagggggaagactaattaaaaaaatggttgtctactaatccattgaactaaggcttcttaacagtcatgctcttcttaatagtatgaacacacattttgtattgattgcagagaataaagaaaaagaaatgacttgttttgaacttcaaaatggaaaaaatgaatacaaaatccagataagcctttgggcataccaactttttcgacttgtattatataacaacagttggcaaatgatttcaagttgctaaagcatagaaaatgatatttatttgatgaaagctaataaatcagacagaacaattaatggataatttggattgaacaagtatgaaagattccaccaataagaaccctcctacctaaaactatgaggtttttaaatgaaagactctcctaatgtcatagattttctctacctgtgctttatctgaaaataaaaatcacagcttttcccttcacctcttcattctctactcctccttatatttcccctttccttcttccttccttctccttcctttactctttgttctttttattcctgtttgttctgattacctgtgatgttttctaaaaacattaaaattttggtcaccattaatattttttacaatgaattaagaaatttatctcagaaactggatttgaaccaaagccttgttttgaacttctaataagtagactgaggaacaagcacgattttaagggcatatttaataggcaaaataaaaaaaacgcataaaatgcccagtcgttgatgaaaaaaatatatttttgtaattgctgttattcaggtgcttgaaggcccatgttaaagtatcactggagaagataaaaagcatacttcctcaatgtgaaaaccctcaaaagaaagggctataaacactttgtcctgaatatttgttgtttcaattgctgacgtttaacttttcatctgacagcaattcaagttctgcgtaccacagtgttgttgaatctttgaatctgaaaaatattttccttgcagctgtgataataatgtatctcctgataatgcatttaatgtggcaaagacacttttcttaaacacagtgaaaactaagtgttcattttgtcattgtaaaatgagacatgtttagttgctccaaattttaacttgggtaaccttgagacatagttgcacatttaacatcctatattttgcttgtcttgcagtcaagtgaattatcttagttactggagtgttacgtgacaccaattgttttgttaccactgctttaaaaatagctctatccctagaccccatcagtagtgtgtcttttagggccccgatttttttctaatctataggttagccctcaaggcaacgtggcctctttctgtttacttctcattattcctgtaattccaattctacatgtgactctttgctttattttaaaacagttgtgcattgctgatgagccttgaagtcaccaggggtggctggtgtcaatagtgagtctgtacatggctatttttatccataaagcagtttactttctgtatgatgaaaggcgttaaagtaaaacctgcctcctattataccctaggggtgtaatcaagagggatttgatcatagcataccaattaagcaggctacagcagactgctctgggttgtactaaggagtagggtgttctccacagatttttgaaccctttattgcaaaagcatcagggcacagcacatctaattcttttcatcgcacagctgtgtacataaacctctgtatacagtttctgctcagaggctgtgctcttagatttaatttttcttataagtcattacagccgtgatcattcatttaaacctcggcaagataagcattactagttcccagtaaactagatgatctcttcctctagactgtattttctcttatgaacaattataagattacaagactagcaatgttgcttatttacactacactacacacacacacacacacacacacacacacacgttcattccaagccagcagccagctcagcatccttgaaagctctcaacctcagccgaatatataaatatcagaattctctctaccaccctcaattagaaaatgttccagttctgcttttaaacttccactccaattcttcttgctaaggcctggaagcctcaaggtttcttgtattgccttatatacacctggattattcctctctgttgaaaactatgtcccattggaatgggagtgtctgaccagctggtgcccaagaatgctctcagaaaacgatcttccacaagccagagccaaaacccaaacccttgacccttatcaaccttgacgcccaaaactccaggtgtggattagcacagtaacccgcaaacccactcctacacgaaggaagatttttctagaacaactacagctctccttttatatttttgggtaattcagttatgatgaactgaaccagaagtataaagtatttgctcagttcagttcttaatctttgtcatggtattacaatactaaaccacttgctttgtcactttcatatagctcataaaagaaaatattactgtataaaatagattctgtagtccttcacttgttgttatggactgactattcgtgtttgccccaaattcatatgctgaagccctaacccccaatgggacgatatttggagatggaacctttgggaattaattagggtaagataagcacatgcaggtggggctctgatccggtggcccgtgtaaagaaaacaccagagagcttgctcttgctttgccatgtgaggacacaggagaaggttgttgtttacatatcaggaggagagccctctccagaacttgaacacgctggaacactgacctcggacttaaagcctccagaactgtgagaaaataaatttctgttgtttaagctgcccagtctatggtatcttgttacagcaggctgaaatgagtaagacacttgtattgtccctgcggttgacatctgactctgtaaaaacacccatgcatacacacacgtacacacaaaacaacaacataaccagtaagataggtaatcaagtatatggtaaatgcacctgattgcaataatgtgcgcatacccttagaatgaccctgtactgcagacacacctgaatgtgttttccgagctacggaatctgggagtagcccagcaagagagcccttccttgtctatgaggaacatctgagccccaagtgcatcccgtggaacacgggccatacatacagcggattgaggccccgagttttgggttggatgaaggttgccaggtgaacgtcattaagggcagagggttaagtaaaaatgctatataaactgcatgctgcccgcaagcagcgttggtttgcccgctcatcccaccgccgccatcactaccactgtgctgcgaggctatcttgtccagtctgccaccactggatcgtttctacaggtaaggcacttctcctgtccagcccaccactactgaattccctcccctgtatgtaaacctctaataaaacccaatgcctcgtttgctggctatgggtttcttcctcagtctcttgaacctgatgccttcgctattgagggttataggggttcagtacaacatcatgatgtgaacaaacgcgtttatttgggcagatgtattggtcagctctcaaaacaataatatcaagtaataatcattacctccaacttaatggttttaaatagcattaattctcatggtcatgcggggtttggctgacctaagttgatctagatttggttctgcatcaggctggtagttgctaggcttggctttcagcggcaggtttggtttggatttctttgatgtgtcacgtccagaggcacacactggaatggcaccggccacccagtgcatgttttcataggttgtcactagatagcaagcccaaacatgccagcccatctcaaggctctgctcctgtcatgttttcttaacaccccgttgaccaaaggctatcacatttcccaccataggctagatatgccatcctattaagtaggaatgagaaagtggggaccaataaatcaacctacagtaggaaaagtaggggattatttagtagcacaaacagatgagtttcagtgggcttgctgcttttttgtggatatggaagaaatacctaaaaaaaaaaatttccagctccactacaatatttaagaaaaaacttaggtgtgttcatagtttactactttgcttaataaccccactgtttatcacagcaaatttaatcacctctgaggggttttaatggctttgataagacaaagagtaaattactgaggaggaagacggtcactttcacatcctgagagatgctaactgtgcaaggtaattcacatatatcttgtaaacatgtttgcaaacatatataggagataggtggtattctcattttttaaggaaagaaatggaagacatgagagaatgagtaatatgtttaagaggacacagctggaaactggtataatctggctctaaatacgggcttttgtgttacattgaacagagataaattcagcttatgttaaggaagcatggggtaaaaaggtcaagaaactgaacaactgaataaccaaataagtaggcgaaaccatttggttactcagttgtctgaccaaccgaataatcaaaacaaaaatgtcacattagaaaactacgatcagtgtaattttatgaataattgaactattgagaccatagtgtagcagctgatctatcacgtcatgggattccatcattcattctcatgaattaactactctcagtccttgcttttagcattacctctactccctaatgatacatgatttttactctaacataaacttcccaggagaaaatgtctgataaatatcataaaatcatgaaaatatctgataaagtcatcatcctgcatcatgtgtgggagacttaagtttgtaactcttcccattcctttaagttggttttcagccttgcttacacgatcattgtggccagagagacagaatgtgccaagcgtgtaggcctgagctgggaaacaatgtcaataagtaatacagtataggggatgagaagtttgccaaataatacttggtgtgtaatgttatgaaagaaagggggcattagaggccgggtggctcacgcctgtaatcccagcacttcgggaggctgaggcgggtggatcacgaggtctaagagatcaagaccatcctggccaacatggtgaaaccccgtctctactacaaatacaaaaaaaaattagccgggtgtggtggcaggtgcctgtaatcccagctatttgggaggccgaggcatgacaatcgcttgaacccaggaggcagaggttgcagtgagccgagatcgcaccgttgcgctccagcctgggcaaaaagagtagaactctgtctcaaagaaacaaaaaacaaaaaacgaaaacaaacaaaacaacatggcgtggggggcatcagaaacacacaatggtacagatttaaaagctcctcgggtgatgctaatgtgtagccagggctgaaaacctaaaagaagaatgtgcagtaatgttgccagtactggaaggaagtgtctgagttttgtctagtgactgacagaaggctatgaaactgtaacagttgtaaggggttgagggaaagccgaggccagatcatgtggatcatgtgcaaattgtaggtaaaatgtaaagctgtgagttctgtggcctcactgaggaagcatttctctgcttttcaggaagtaacttggagttgagtgctctatgatttccaagttgtcagctaacacattgaataactgatgaattatggttctgtggccttcatttctgtgtcacgtggctatactgttcattggcatatgcaggcagtaacccccaaactatgacgcgagaggatggcaggattccaggtctgaagagaaaaaatgattaggctggggaagaatgatttgaggaacctcaaatcagactatggcagcaactactaggtgtagggcttcatgccatccagccttggagttgtcagttttctattaatctttgctaacaataaaatactaatgggtacataatgtagtgatttacagatgatagactctccttatgttttcattttgtctcaacagagtccagcatatttcatccaaattttactgatcagagaattgaggtacagacagaccatgaaggtcatgacagttggaaagtgttggagtagaataaggaagcctgatttttctcatttgtcctacatcgctttattagattgtcttctccagccttacctccccgccttataattcttgattttcatgaaacctattaaagggaaagaaaaggaaaactagaaaatttaatttagatcacttttaaaaatcactttgcatcttggactgttgtcataagttataggattaaatcctaatgattctaatgttgttaggccatcttaatttatatgatccacttacctctcagtcttctctcactggctcactcacctgccctctgtatatgaggggattgagaaaagtctgtttttcattatgtgtagatacacagactggtgtgtatgtagcaggaataaatgttcgcaaaactcagatgtggaagaagtaactctgaatttttgccctatttttgaactgtactccaggccagtgctgtccaaaagaaatataagctatatatgtaatttaaactttttgagtagccactttaaaaagtgaaaataaacaggtgacattaatgttttatttagctaaaatatttcaacatgtaatcaaaaaagacttaatgagacattttacgttagtgaaaagaatgtactaaatcattaaggttggaggatattttacatttacagcacatctgaattcagttgccatattttcatgggttaaagtaaacttgttctcccaaaccaatgaagttatggttaatggaagaatattaaaaactgtttgttttcaatataaataaaattgaagcaaaaataaagcaaaatgaaaatttggcttcctcagttatgctagtcccatttcaaatgttcagtagccacatataactagtggctatcttactggacaacataaccccagatcatgataaaacgttctgatttcccgaatttcttttttttagacaatctgggatgtttcgccttcttaccaaagaaacaaaaaggtgctggtactttttgtttgcttgtttttcagcagttgccattgaaatgtgtttcttttggagttggataggaaaaacctagattcttcctccaaggtgtagtctcaactgtgccccaggcatcactgtttatgatggattaagggtgtggcttttcccagataatgagtccccctcccccaccccccacaggccttaatatctacagctcctgtcaatagactggcctttccttccccgcgaaaagtttgagtcctttaagaatctaggtctaaggttaatttcaacgaaaggtttattttctctttctgcgaggacctatggaactacccagaacatataaagcagtccacaaggctcttcaacagcttcgtaaccgggcactgctagttcagaaactcactgacttctgaatgtccatttcacatttgcaggctgcttctctgagtcctgagctcttgtctcaagatgacttggctcttaattgttgtctgatttattaccggtttgctttgcagtttaggtgctggacaatgattcttagaaatccccacataaggatctacatgcagtggcagtgaatctcaataactgccttttcttgaatctgaacttaatttatatataaagcctactttccggtagatcctgcatatttcatctcagccaatttaggactgagatgccccccctttctctggggttttgtcttaaatttctggaggggacctgattgtcacgcccctccgagtgaagagaccaccaaacaggctttgtgtgagcaacaaggctgtttatttcacctgggtgcaggtgggctgagtctgaaaaaggagtcagccaagggtggtgggattatcattagttcttacaggttttgggataggcggtggagttaggagcgatgttttgcgagcagggggtggatctcacaaagtacattctcaagggtggggagaatgacaaagaaccttcttaagggtgggggagattacaaagtacattgatcagttagggtggggcagaaacaaatcacaatggtggaatgtcatcagttaaggctattttcactcttttgtggatcttcagttgcttcaggccatctggatgtataagggcaggtcacaggggatatgatggcttagctcagagtcctgacactgatacagtgccaggatttgaaggcgggtgtggcttacctgatttcatgtacaattcatcccatagggaccttgttccttggcctcaagttgtaggccctttcatatctctgtacggtcaagaaacatggtggttcccttgtcattcttcatcctccaaaaacccattgagcactgtgtttgctggaggcatgtgggaaattattctactgtaccctatatcctgctgaagtgcctgggtactgggtggctagctcatgtccatttgctaagacacatgctcacgattcttgcctgggtctgacataactttggagtcttgttgcattcctgggctggactctggaatgggacccaattacttctgcacctggatacccccaaccttctctgttgtggtggcggttctttcaccatcccctcctctcaggaacacactcttgtttctactttacattctccatccagtccaggaaaatagtatctaggctcagagacggagaaaatagtgtctatatttcacatttttttccaaaaaaaaaaattataattttccgtgcctggacttgagaatttgaaaactccaaaatcctccaggttcaaccacattgttcccaattacaggattttcttattaaagttgaatagtgttccattgtgtgtatattccacatttttgaatccgttcatctgttgatggttacttaggttgattccatatcttgtctaatgtgaatactgccacaataaacacgggtgtgcagatatctacttgatatactgatgtcatttccttaggtatgtacccagtagtgagattgctggattgtatggtagttctatttttatttttttttgaagaacttcctgctgttttccataatggctgtacctatttatgttcccattaagggtccaaggtttccctcttttccatattctcaccaacactagttatcctttgtctttttgagaatagccattctgacaggtgtggggtgatagcatattgttttaatttgcagttacctgactaatgataagcattttgtcatatacctgttgtccatttgtttcccttaagacatgctcgttgagacatggacacggggaggggaacatgacagaccggagcctgtgggggtgggggcgtagggagcaaggggagggagagcattaggacaaatacctaatgcacacaggacttaaaacctagatgacgggttgatagatgcagcaaaccaccatggcacatgtatacctatgtaagaagcctgcacgttctgcacatgtatcccagaacttaaaaaaaataaaaaataaaaattcagttccttaatcacagttgccactgtgattttactttgtcatattttaaaagcttttttatttcaaaaaaaaagtctgttgaggtcctttgcccatatttaattgggttgttgtattgctattgagtttaaggtttcttatatatttttggatattaatcagagtgaagggacaactcatggagcaggagaaaatatttgtataccatatacctgaaaagggattatttccttggctgtgcagaagctgtttaggttgatgcaacttcatttgtctatttttatttttgttgcctatgctcttgggttcatatccaaaaaatccttgcccagaccaatgtcataagcttttagttgatgtttttttttttttttttttttttttttttttgagacagtcttgctttgtcacccaggctggaatgcaatggtgcggtctaggctcacagcaacctccaccttccgggctccagtgattctcctgcctcagcctcctgagtagctgggactacaggcgctcaccacaacgaccggctaatttttgtatttttagtagagacggggtttcgccatgtttgccaggctggtctcaaacccctgacctcatgatctgcccgcctcaacctcccaaagtactgggattacaggcatgagccacctctcatagtccatgttttcttctagtagttttagtttcaggttttacctgtaagtctttaatccattttgagtcgattcttgtatataacagataagggtccaattttctttttatttatttattttttttgagatggattcttgctctgtcatccaggctggagtgcagtgatgggatctcggctcactgcaagctccgcctcccgggttcacaccattctcctgcctcagcctcccaagtagctgggactacaggctcctgtcagcacgcccggctaattttttgtatttttagtagagacggggtttcaccgtgttagccaggatggtctcgatctcctgacctcgtgatctgcccgcctcagcctcccaaagtgctgggattacaggtgtgagccaccatgcccagctgtaagggtccaattattaatattcccaattgaatggaagaagtaaaaggaaacaaaattaaccatattctcacttaaagtcattgttatcattttggcatatttcattgggttcctttttacccgaaatgagggttttctgctatttatttagatgtgatcgtgctatatttatgacttttcacccttttttactatcacataagtgattttaggttattatagacacactttaaatgttcacataatgaccacttattctaaagttaggcatttagttttttatttttgttgttctaaataacccagtagaccattttgtttccttttagacagcttccagcgcatgaaattattaggtcaaaggatattacctttttttttgagacggagtcttgctctgtcgcccaggctggagtgcagtggcgcgatctcggctcactgcaagcttcgcctcctgggttcacgccattctcctgcctcagcctcccgagtagctgggaccacaggcgcctgccaccacgcctggctaactttttgtatttttagtagagacggggtttcaccgtgttcgccaggatggtctcgatctcctgaccttgtaatcttcccacctcggcctcccaaagtgctgggattacaggcttgagccaccgtgcccagccaggatattaacattttttaaagggtctttatatgtatcgcaaaaatacttagcaaaattattattattattattttttaccagtttacactgcccaccaagaagctataaggacacctaaattgtcacataaaactgtgtatggataaatatctctattttataaaccacttggtataaccaaaatcctgcttttgagatattaaattttgaagctaacattcttagcatgtttttaaaataatactgacttcatgagctaatacccataatgataaaatgattttatattccaggaaagctgccatgtgggattgaatgttttatatatgatacacttttatctacatatgttgttatacagtcattggtacctttttattagatgaatttatttcatattcagtttccactgaattgtattcagcttgactacaaattagtcaagcagaataagaatgtgagttttattgtgactaatatatatttggagtctagatttggagagacaaggggtgagtaaaactgtgtgcctactacctgaaaggaaaggttttttttttttttttttttttccccctcaagggaaacaattacggagactgcccaggcatttaatattttattgaaatattctaaaccctcaaatttcgcttctacattttatgtgatgcatcagaaaaacactattttatttgttttataattctccaatagggaaatttcaacacattgtaagtttctttatttaacaacatcatctagcttttaataactgactttcatacacatttttaaaagcaggctaatcgttatagcttaatatatttttcatgagatttagtgataacatgatcacttataccagtagtttatctcctgaatcattttaaaaagtaatgtgcatgttttctttatatttatatacaattgggaagcttaatatttatgaaaatatgattgacttttttttgtcatttctcttcaaagccttaggctttgcagttatcagtagtgcagttccaagatgcaaagtcataaacttacctttcattctctttagtaggcttaatattttgaatctagccataggaagcagcctgaaacctctaatcgaaatcaaagataacaccacaggggtacaatatctctaatttgtcttggaatgatgcggtagcttcccttgactgctgtgattaaattcattctggtttgttcagttaatgagattagcacatcttaacccataggaaatattgtctttatgggcctatgactctgaacagattagcatcatgatcagaaaaataatttttaataaatgattacgtgtgagtggtgctaggctaggatccctacaaatctggcaagagcatattccttgaccttcagcattatatgactttataagacacagcattttctcaggcatgggtataaatacagttaaatatgtactataaaactaaagaacagcctgaaatttaagaactacaagaatttgtgcttgtcattaagctggagataaagttaacatcctgagaagatgtaaaggcgacagtgatacacttctccttgtttggtaggatcatttccacacttgtctgtacttggaattgtaaggtgatgagtcccttaatgatttcttattgcaagtttgaacctagtgtatttcatggtaatagactaaggggaatgagtatatgaaatgagttccagtgtattgatgaaacttagagttgcgtagagtggagcatagcttagtagaaacttgagcaagttactgtagcacatggtcctggttccaattccagcaacatctgttagttttaggacttggtgcaacttgttcaaattttctgtcagactctccattggtttaaaaaataaaattcaaaatattgacaaatattgccttcctgaattttttggtgaatattaagttagatgatgtatataaagtgcctggcccatagtaagggctcaataaaagtagctgttggtaccgcttttaactaattgttgttaaattgattggttaattatatatttccctgccacttaactgtcactcaacagcttttcctcatttcctgcctacctgattggaaatcattatgttgaatatgtctagaattatcactgggcctgctgtattccctgggtggtatgtttgtataggttgaaccactaaagaaaatcttttcggatgagttactttcctatgtcaccctactatttcctagtgggaactttaagttccttcagtctggggtcaagactagtcttagtataggggacattgggaatattgaggatggcatgtttaagtaacattgtatgtattggtcaagaaaaaacaggcaagggatagagtacatcaaaaccagaaaacctatgtacttacctttccatttctgtctttattagatatgttgagtttatttcaagtgcctctatagaacatctacagaacattaatattaagaatatcatgaaaagggatacatttttaagagcctaaattttggataaaatggaagtcattttcttttttttttttttttttttttttttttgaaacagagtcttgctctgtcacccaggctggagtgcagtggcatgatctcggctcactgcaacctctgcctcccgggttcacgccattctcctgcctcagcctcccaagtagctgggactacaggtgcccgccaccatgcccggctaattttttgtatttttagtagagacggggtttcaccgtgttagccagggtggtctcgaactcctgacctcgtgatccacctggctcggcctcccaaagtgcggggattacaggcgtgagccaccgcgcctggccatggaagccattttctaacaacaaatttaatttgtgaaaagctggtagcatgttaactctagaatgacaattttttaaaaggaaaattccaaagttaaagggaaaaaatattggggtagtgccagctagtatcaggatttatactttaaaaatgcataagaaagaagcaattaccagtgtccaaataagaaatgagagtaatagaaaactcagatttcattgtattataaatttaataaataagttacacaattgccgttcagtgcctgaaattgatttttctttttttgaggtcaaacttcaaccatgtatatgaaatgtaagagcaactttctaagcagaattaccctttctgatttccttgggttccttttggttctttaatctgtatgactaagagtgtggattggctgacattatgagatgcaattaatttacatgcttaagttaggactataccatcctgtttccatccattcttgatcacaagcatattacaaatgctgtgctggattatctttactattaagacatactgcagaaagccctgcaggtaaagaaaacaatctagggcttaccttagaggcaggaagaattgcatgttaagaaagctgcatacactctggctttttgctctttgagtttagctcaatgtcttcctaaactttggtgtgcaggaggtgactacgcagtatttaaaatctaatccatattatgtgtatagtatggatggtatagcaattttccaggtggatttttgacaatattttattttttactattcatgttgactttgaaaaataactacagggctagatttgattcaactgtccatggttagaatttttaaaaaagtttttgactctaatacaactgagttccatctacagaaagaatgcacatatggatacggctgtccagaagatcaaatatccttgtactgaagtatatctatatttagtcattattttataaaagtagtagaaaacaatagtggaatataatatgtggtctttggaagaatgagaaatcatccttacccattaaacacagacccaacacttaatgtatttccattttgatagtgacaagttttgggtttgggatgatgtgtcagccagggtcagttaacagacagaaaccacttgagtgactgtagcagaaaataatgtaacaagaggaattgggatctaggtattgaaaaattgacaaagagaagaggtagcaagtgcacaaagtagctaccgctcctagggctgggaagacaaaaggttagaattactaacacttagaacccttgaggaaggactctacaaagctgagctcaggtctgagtagggggctgctacgtggctggtgctaccctctctgggatagcaggaagggcccaatgggactgaggcccggacctctgccagccaggtggtgctggtatttctgcagcaggggcgatgaagctgattctctaagcttttgaaaaacaaaacacaagctaaattgaatagcttgttactaaaaagtgctgctgcaggcatgaagaagcacgtctagggaactgctaataaggacagtaagtgcatgggaagctagtgtgaatgagtaaatcctttgtccctcctccaggcttgcagtctccctctattgctccctacctttagattctgagagtcagtcagtaaagccagaagtacggtttgcagagtctttgcctcagcgttgcaaagtagggtttagaagggtgtgttggtatggctctgaggaagataaaatctctaaccagcatgagtgctaatatgtctaataagatatatggaaaataattattaagtatttgactgaatttcaaggattaaaaagcaatacttaaggcaacaaaaacatcttatatttccattaaagcataatttttcttacagctccttcacattggcaaaattagtttgccctcttgaatttttcaaagatgtgaattatggcaagtaataattgctgcctactattgaatatctggatgttgtagaactgccattgtatcatatttaacttatttttgagagtgttagatttcctctgatagaagatattttttacttttccaagattaatagtagaaatattgaacatcaaatcattttacagataatactgtcctaacattgcgtaagtatacaattattcatagactcagaaatcataattgtcttcacagaaagaaaccagttcagaatactttaagaactatttggaatgttagatttaaaatattctgtagccaaggtaaagcaagttagctaaaattccttttgtttctattgtttttagaactagcttcaaagagaaagaatttgataaatacttagtgtccaataggctctttcatacagttcaaagatgtagactgacactggcatctacagttcctagctgtacttactctggtattttttgccagctgccttcgtggtttctgcttcatacctgtttgtattcataaataactcaatctaagatttttagctttttaaaaagaattgcatacaatcatcatcagattacaggtttgaaagaaatcttagtttttttctttttcttttttttgagatggagttttgctgtcgttgcccaggctggagtgcgatggcgcaatatcggctcaccgcaacctccgccttctgggttcaagcgattctcctgcctcagcctcctgagtagctgggattacaggcatgcgtcaccacacctggctaattttgtatttgtagtagagatgaggtttctccatgttggtcaggctggtctcgaactcccgacctcaggtggtcttcccacctcggccgtctaaagtgctgggattacaggcgtgagccactgcgcctagcccagaaatcttagtctttttaactcagttttgagattctgccatatacctggcactgtagttaagagatggcatataaatgggaaaaataggtatttcaaaagcaatcaaaagcaattacaagactatatagtatgtcctaccacgggggtatgcatgggagcagaaggaagaagagacgaattttgcttggctagggttgtattggggttgaaattgatatcaactatagactagaaacttaaagggattttcatgccaacaagagtacaacaggccattcaagtccatctcttccaaacattgattaaacatcttttataggcagacaatcagttagttgctaagaagactaagctgaaaaaggcttttttttttttggccctgttggagctttcagcctattggctgattaaaaaaaaaaaaaaatgctgaggagtatgaagtcacaaaccaattgagttcaggaaccagtaagtagtttgacatgaccgtaatggaggttttgggatatgggcaattggcaaaaaattgaaaaggatgcgggaaaggtggactggggatacaatgtggatggatgattccttgctcaattgagatgaatgtgttcaaaaaaaccaggaagtttttttttatgttttgcatattagaaagttacatttggtggctatatgcagaatcgtgtatggggagagtacaggtgtggaggtcactcatgaggctaatgtctattcaaatgggagaagaggaaggtctgaaaggcaatcactattggaatacatgcaagtacatctagcattgttctgtctttctgaagatgtggaaatgaagctctctcagaattaaatgacaacatgccatggctgtttgttagagggaatggaagtagagattgaaggtcttgatttccagctgatcatcctttttatggtaccataccactcacccagcctgttgaactggaaaagattatgaacatcaggcattaacctaccaaagtaaagcaaaacaaaaacgctgaacttctccatatttttaaaaatatgtgacacatatatgtttattggaaattaaaatacagtaaaggctctttaactgtcattcaataaatattttttgaatgaacgacgatcacttgtcaataactggtattaaaaaagacaaatattaatggtgatctttattcaataatttcataaaatgggaacaaagtggtaatttgccagtaggatgaggagggcatagcagaggttgtctaaccttttggcaagggcaaagtcaaactggtgaataagcaacacaagctgtgatgagagtcatgtgccatatgtaaatggtgactctttcttcctccaatgctgtttatcaccacaggcttcccagcggcccaagaacagtctgccgcagtcactggcattaataaatgccatctctacctgaatgcccttcttttcaaatttttaccaaaaggaagatagtagactttcagttttccttctggctgtgagaggcatagggagaataacggtaacagatgcaggaataaaaaggcttgatacacatggatattatgtcatgagggattcaggagtttatattaatatacaaatattagttgttttttttttgtttgttttttgttttttgttttttttttgagacgtagtcttggtctgtcgcctaggctagagtgcagtggtgctgtctcaactcaatgcaacctccgcctcccgggttcaagcaactctcctgcctcagcctccccagtagctgggattacaggtacctgccactgtgcccggctaatttttgtgtttttaatagagatggggtttctccatctcggtcaggctggtctcgaactcctgacctcgtgatccacctgcctcagcctcccaaagtgttgggcttacaggcatgagccattgcacctggccccaatattacgatttatcctgccctacctcaccactcttttcatgattagagatggaaaaatttgatattatttaaaaatcagtaagattctatctaatcaaaccattggcagtataattcacaacttttttagagattttctaaagtaatacagatactgtagtattgtagttttgtagtatagctacaagaaaatcatactgtgctctgaaatgctatcttagtaacatattgtgttaatggattataatggtaatcaaaacctccatagagctacaggtttgaactctaacattctgtcgaagttaaagattaatcagtttaacaccatattatttttattatttttgagacgtagtctcactctgtcgcccaggctggggtgcagtggagcaatctcggctcactgcaagctccgcctcccaggttcatgccattctcctgccttagcctcccgagtagctgggactacaggcgcccgccactacacccggctaatttttgtctttttattagagagagatggggtttcaccgtgttagccaggatggtcttgatctcctgacctcgtgatccgccctcctcggcctcccaaagtgctgggattacaggcgtgagccaccgcgcccggcccattcctagtattttcaaatagaaatctgatgcctttattactgtaattagaggaatgcttatgtttcaggttgggttttggtaaagcccatgtggagaggagaatttgcatgaaagtagtttaattaaggaaatgttctcagggatggcaagtaggtgagcaagagaagtagaataggaatggggaagaaatcatgcaaggagcaatcgcaggcaaagtgccagcctcagtctggttctgcaggaaaacctgggcctaaactatgcttcagcttgttgcaacttgatacagaaggagctgggcttttgtattccagtagtcaccagtcattgccttaagactaccctaaggtgacataaacaccaaggcacttccggatctctgtttttgttggcaaagcagctttactagcctgaagacagtcatctaaagagatgtagatacagaagttttgagaagcaaagaccacaaaagccaaggaggtgggcacgcagaagtgttaatggaatcttagtggatctggataaaacacgattttttggctataacctctaaagggctaactttcagaagattacgtggacccaattaagcacttacctgaataattttgaaacatctctaattgtactatagctagagttaaaagaaaaaatattttctaatataaacaaaaagttcagaattatagcattattaaagaagcttttttcaaatgttagcattcctgcttcttgactttacatttttccggaacaaaatagttttccaaagagtatacttaatgacttgtgcagatgaattctaaatgataaccacagggctcttggacaagggatcatttaaattttgagttcttgtcagtcagacatatcaatccatatacatttccccaaccagggtgtcagaagtgtagtcaagtgagttttgtaatgatacttctttgtttacatctagctgcagaaacctcttaagactgattctgcatcagaataattgctagagggaaaagggaagctgtgattatgaaataacactgttatccactggcacccctttgtgtctatcttagttgaagctttgaggcacttctgtgtctattatttgattttaattggcaatggtattgattataaatcatttgacagaatataatttttatcttaaagtttaaatgtacctagaggctacaaagattcctgcgttcaatgaaaacattaaagtaatagtgtaagtagtttaaatgtgccccatttggcacagattagtgtcacctatggtacaactcagtcaaaaagtgaatgtagctgaaaactgaaactgttcaacagctccaaatttaagaaacacggaacattcactatgtgcaatagacaatgctagttttagtaggggattaaaaaaaaatatctttcagccaggggctcataaagtagtgaggaaacctacaacaacttcaagtcagataatgacaatatgtcattaagggacatgaacaaatgaccgagagaccgcaagatcaggagggactttttttggagttggttataaaggaatggcaaggcacatgggaatcaagaattcattcaaacagagccttgaagaaaggtgttggtggagtggaaggctagaacacaaaaatacaatctacagaataagaaagcactagggggcaactgtggttggagtacttacaagaacggtttaggaaaataactagttgtactacatagactaaattggataactgtcaagatttgaggattataggtgaagaaaccattttagagtttattataactgacattttgtatctagagacaacagggatatcagtattgatgtaattaaaggatgtggcaagaatgaggtgaaaataacttatgtcttagggctgaaaaattgagaggatggtggtatcattggatatggttagaaatagaaataagcaaaactatgatggggaagtgatttgtatttgggatatattgtctttgatgtattgatgggatatccaataatctccggaaaatatgtctggatctgaggagggaaatcagtgtgtgtttgataggtgtagcagtgagaaagtatcataggcaagataccacaactaaagaaaatggtttgggggtaatcaatatggagtttaagccatgggggcagatgatacggcaaaaggatattatacacagttaaaaaggaacccaaaaccaagtcttggagaattcacatttaaatacgtgcagatatagagaagccagcaaagaagtgttaggagaagtcacaggaaactgtaaagtgtctggtcacagaagcagcaagaaaaacagtttttaaggaggtgactacattgaccaaaggcagtgattgaattgaaatttacttggggtctgagaaaagaccattcggttttctggttgctttgactaattttaaagtaacaatttcagtggagtagtagaccataacctataaatgcattgatgtatttatttattcattcactcactaattcacttatccaatagtcattcatttattcttcggtgcttacaaccgggcctggcactggattaaagtgaaattagaagtagataaactggtagagatagccaaaacatatctccctacagaagggaaaagagcagaaaattatcatggaaacactttgcatagagtttctcacagcaggttgaaagtatcctaaggttatagcagtgtaggctggaggaaaaggagaaaatacagactaggcaggacaggcactggggaaattcaggtgtaactaagaagagactgagtgctgggagacagggtgtaatctgttaaatagaaacataggcaatagtaaatcagggaaccagaaagagttcaagagtcgatgaagagggacatgtatcaaggtctcgatcgagagggctgtgattcaaggcagagcctccattccagagggagcttaggatactcttctggttttctattactatgtaacaaaacaccccaagtacagtggcttaaaataacatctcttttatctttttatctgattttgtgaatcaggaattcagccgtgttcagcttattgatttttctactctgtgtggtgtcagttgacatcacttggcagaattcagctagtggatgtgctggtctggagggttcaagacagattcacttaatgcttaatgccattgtgagaatggctgaaaggctcagttcagcagggactgtcaaccagaggacttgtagatgtcttctacagcatggtggtttcagggtagtcagtttttatgcatggcatcttagggctcccagagtgagtattctaagaaacccataaagaggctaaaagttactaataatgatctaatcttggaagacctataacatcatattcgttgcattctacttggcagacaagttgctaagacaaatccgagctttaaggggagaattagatgctgcctcttgatgaaagaagtgtcaaataattttgtggccatttctagtccatcataactgctgtaaatttcctcctcctaccatggtattgagtgatgcatatctcacaggaggagagtgtgtcagtgactctagctgagaagggcagaagaaagaagatccttgcacaaacaagccaggcgagagagaaaactggcagtttttaggaaagaaaagagatgcatcttggcaggaaacaattgatggtagccagagttcaaggctcatgctgaccgttcattcttctacattttctaagctcaatctttgtatcaatagagaatatcagaaaacttccttggggaatcttactttggctctctgtaaaaatgaacttgtcgcaatgttctaccctcaacaatgggtgaacacagatttaagaaaaagacatgaaaagcttatctgttcttttgtgaaagtgccaaacactttctgttaaggttttcattgttgttaaagtgaaaatttggtatgacagctgctgtgagggatagacttaaggccttgcaactcaaattatggtctgcaatctaggagcaccagttgaggttttgttagaaatgtacattttcaggcgctatcctagacctcacacgagtctgcacttgactaacatcttcagaggtttcatgtgcaaacaaatgttgagaaactctgatctaagggatgtttcattattcagatcattgcaaaggacttgttaggttcctgttcttggtcttgtccctgtggacttcagattgaaaatcttacccttagcttaggctaagataaaattcctttccttttatttgatggcaattatacataacatgtcattacttgatttttattcgactttggagaagcaaagggttttggctaatttttagtaactattcttagcttttacaatgttatcattttatgtttgcattttttcctagccttatttagattctagacacagaataggggactgtgagtgctgagagtatccttagagaataaccactgtaacctacttcattttcatataagaaatgaatgctcagaaatgtgccttgatgtactcatggctacttaatcagtggtaaagctgagcctagaattatttcctcaaaattgtagtcctctgtacacttggatcagaattaacaggcaatgcatgtcataacgggctcatccaggtggttctaatatatactaaagtctgagaaacaggcctgagtgtagcttcaatgtctgctctctcactctaatgcctactgcctgccatatctagatgcctgtgtgtatgtgaacgaggagggaagagaattaaatcctagagatgttggtagccaattatctcaaaagcacatatttaggggtcagcttttaaaaggaggaggggggcttattcccctgacatttgagcaaagcaggaaagggtcggtgatgaaatgccatgtgtcctgaggacctacaggcctgggttatatgaccacttcaggaattgcatagcaatcaaaaagggaactaaaagaatcggaggctgggtaaaatcaggactaacaattgataaagcaattatgatcaacagtgagtgagagaaggagatttacctgatggtgaggtggtagccaccactaagattagtttaaataagattagccaccactaagagttttaaaatgaatgcatgaggcactggagtcttccattgcttctcttgccctccttgatgtcttctgacaggagccatagagatctttataaaacacaaactagatcatatctctcctacccaaagcctgtaaaagcatctctattacatttagtttaacatctctactgtggcttaccccttatccttctttgcccactaacttcatttagcatccacttcccctacttccctttgtgcatcttgtgcctgctatctgtaattcttccctttttataaaatctcctttttaagatcataccttgaattgtatctcttcagaaagggcttcctatagcttagccttaaaattctttttcagttgactttatttctaccttagcatgtaaaatgttgtcatctcttatttgttgttcatcttcttgagacagtaagctccagaaatgcagaaactaaatcattattcaatctaacctcatgtgatatctgtcacattgtagataatacttgaattttaaaaaggggacagaagtttcaagaacagtatactgtggtttaagtgagcaattcactgtgtgtgatccatggggtaggatggttcgaggtaggtgagaaagcatgaactggccatgaacatggacgcaaattgatcaaagtcattgcagcttagcaggtcaaaaagctgtgaggtcagagcatcagttaaaatgttcaatggtagttggtcatgatggcattagcaacctttaaatttaaagggacttaagtcacatccagaaatcggggatgacaagcctatagtcatcctctcttgaagtcttctgctgatacaagtaatcattcagtctgttggtctctatccccatgtcaccaccaacgatgactgggatccagtcaagcccttggatatcatgtcctctctcgtgtccttttcataccaatttaatcatgcctggagtgcccagaagcatactttcagtctcgcctgctttgacacctgactcattcatgccttaacctactgtgctagtgttatgatggggagggagggggtgactgagtggatttgacctcccaaaccatattctagcaagcaaggtacatcttaactctggaattcttctaaacctatatagggtttctgaaacttagtctcagagtgggagtggaatgatacagtactttgtcagaagctcataacaacgactgtgtcttaccataatccattacaatactgttcttgttccagttgaacagctggaagttgaaaaacatttcctttggaatgagtcaaactgtatcttacacaatcttcccagctcttatttacgagatagataatgtcattggtgctcaatatactaaggatttttcaatgcagggctctaatcttatcaatagattccagggaattactgagaaacacattatttgatccttgatgtctctttccttgtatttttatagtagcacgcttgaggaagtacacatatatagcttccaagaatgagggaaggcatcagttaatatgttaaaatagaaacctcccacttgatcttaagtatggggagggcgggggaaggagacaagccttaagcctgtttaccattgcaggtaaacaaacatgaagatcaaattctaagtaaggagagtttgttatggaatagctgagactgagggcataaagacaaccattcaaattattctagggtttcagaagacactgaagaaagaatagggagatgaactgttggtgaagcagagaggaaaaatagaccaagattaagagaaaaaaaacacgggaaaagattgcaggttggaggagggtgggtctatccaaggctgaggtcgaagcttacggcaaggatgcaggggaagaatgttttgttaatggtaaatagattgcaaaaattctgtagtttgcctgttcattctgatgatgggttttgtggttttttttttttttttttttttttttttttgctgtacagaagccttttagttctatctcagttgttaatttttagttttgttgcaattgactgatgtttttgtcaggaaatcaaaatctttgcctgtgcatatatcctgaatggtattgcttagattttcttacagggtttttatagttagtgggttttgtgtttaagtctttaatccatcttgagttaatttttgtataaggtgtaaggaaggtgtccagtttcagttttctgaatatggctagccagtcttcccagcaccatttattaaatagggaatcctttccccattgcttgtttttgtcaggtttgtcaaacatcagttggttgggtattagatgtgtgatcttatttccaagatgttggttctgttccattggtctatgtgtctgtttttctaccagtaccatgatgttttgggtagtatagtctgaagtcaggtagcattaggcttctagctttgttatttttgcttaggattgtcttggctatatgggctcctttttggttctgtatgaattttaaaacagttttctttttttctaattctgtgaataatgtcaatggtagataaatgggaatagcattgaatctataaattatacagtatggccattttcacagtattgattctatccatgagcatggaatgttcttccatttgtttgtgtcctcttagttccttgagcagtggtttgtagctctccttgaagaggtggtgcacttagcctgttagctgtattcctacttactttattctctttgtagccattgtaaatgggagttcatacatgatttggctctctgtctattgttgtaggaatgcttgtgatttttacacattgatttttgtatcctgagactttgctgaatttgcttgccagcttaaggagattttggggtgagacgatggagttttctagatacacagaagagacagtttgacttcctctcttcctatttatccttgatttctttctcttgcctgattgccctggccagaaattccaatacagtgttgaataggaatggtaagagagggcatccttgtcttgtgctggttttcaagggtttgtcataccaaaacctacagccagtttttgcccatctagtatgatattggctgtaggtttgtcataaatagctcttatttagagacatgttccatcaatacctaatctactgaaggtttttaacatgaaaggatgttgaattttatcaagacttttctgcgtctattcattcctttgcattcttttttctctaatcttgtctgctggtgttatttcagcaagataatcttcaagctctgaaattcattcttctgcttggtctatttggttattgatacttgcggtagcattgtgaagttcttgtgttttttcagctcccttgggtcatttatgttactctctagactgataattcttgttaacagctcctgtaatgttttatcatggctcttaacttctttgcattgggttagaccatgctcctttagctcagtaaagttcgttattactcatcttctgaagcctacttctgtcaattcagccgtctcagcctctgtccacttctgtgcccttgctggagaggagttgcaatcacttgcaggagaagaggcactctggctttttgagttttcagtgtttttgttttttgattctcatcttcatgagtttgtctagtttcaatcttggaggctgctgacctttggatggggttttaattgggattttttttgttgatgctgttgttgttgctttctgtttgcttttttaacaggtccctcttctatagggctgctgcagtttgttgggggttcgctccagaccccattcacctgggtcccttctgcacttggaaatgtcacctaaggaggctgcagaacagcaaagatggctgcctgctccttcctctagtatctctgtccctgagggtcactgaccagatgccagcaggaaccttcctgtataaggtgtctagcgactgctgttgggggtgggtctcacccagtcagggtgcacgggatccaggacccacttaaggaagcactctggctgccccttggtcgagggggtttgctgtcctgggggaatcccacttgtctgggcttcccggattctttagagccagcagggtaaagactaagtccgctgatctgcggagaccatggccacccctccccctaggggctcaggtccaggggaatcggagttctttccctaaacccctggctggagttactggaattcctgcaagcaggccctgcccagtgaggagggatgggtcagagtccggcctaatgaggcaatctggccattatttgccatagctggtgtgctgtactgcagggaattcctcctgggttcaaactgtccagtctccctcaaacctgaaggggaaaaatggtggactggagctgcagtgatggctgctgccctccctacaggagctcagtcctctcagtaagccggtagccaccgtgatggctgctgcccctccccacagcagctcagttctcttaggtggcagttctcttagatgccgcccctccccgggagagctcagtcatttgctgtaacaggcagctgcagtgatgatggccgcccccgcccccggaaactgagcagtcttaaggagtcgtctccatccgagtggcctgcgagaatctgcacagctgtgttttgagacccaaggccctgttggcatgggctcgcaagtgggatctcctgatctgcgggttgcacagatctgtggaaaaagaaagatttcccaggcagggtaggacaatcactcactacctcccttggctgggagtgggagcttcccttgtcgcgtttggctcccaggtgggccatggcaccaccctgcttttccttgcgctctcatgccaactgcctagtcagtcccagtgagagaacctggacacctctgttgctggtgcaggattcactcacggttttggttcttctcagtgggagcctctgactgcagctgttcctagttggtcatcttggcctctctccatatttttccatttttgatgtaactttaagtttttgcttaaattcccatattggatattacagtctaaaatcaagagaaggttaatgtggaccgagccattatttaaatttaaggttcaaagaggtaggtcattcagccaggtgagtgagcaccaatcttttaaaaagttggttaactatttgatagtttccacttttcaagctgataatgatattttaaaccaaggtcatttcaatttccttttggttcaatatttttggaaagttgctacctctttgaaataaaaatattttgtacaggattgtttacaattagcaaatgtttgctgataaagatgaatcactgaattaggtaccttttgtagttatgtaataaagctcttggtaaaaacttctatttaagcagttataactaatttttcctattgaaatgtcaggtacctattaagattttctcatagggcaattttaaattttttctttgagctttgtaagaaaaaaattgtcaactctactttcctttggctcttattcaactttattttaaaatgcatttttctagaaacactaactaaaggtgacagttttagttcacagggaactatttttgatttactatttttgttttggaaatgtctgaataaaccactggaaattatagcttataatgaagaaaacaagataaacacactttttatctaaagtgacagtaaaaatctagcaaatgggagaaaaataaagtcaacttttttttttttttaacttctccaattgaacgtcaaatgaacatattgggcaaggaatacaaccttagttgcatttacaatacagtggctacaacagaagagttaaacactaagtcttacgaaaggtagctttagaaatatttgaaagttggccgggtacggtggttcaggcctataatcccagcactttgggaggccgaggtgggcggatcacgaggtcaggagtttgagactggcctggccaatgtggtgaaaccctgtttctactaaaaaaatacaaaaatcagctgggcgtggtggcatgcgcctgtaatcccagctacttggaaggctgaggcaggagaatcgcttgacactgggagacggaggttgcagtgagctgagaccacaccactgcgctgcaggctgggcgaaagagtgaaactctgtccccccccccccacccccccacccccccccaaaaaaaagtgtgtgtatgtatatattaaggttgacactgtatttaaaaaatttctatgaaactgacaaaactattgcttcgttaattcttttttgcaagattgcattggaggaactgcatggaatataatgactgtgttcttttctaatagcacatgagtcagatctctagaaactgacttttgcccatattcaatttcagcagtaaaataatttctagcttgatatttctcataaaaactcctagggctcttttaaaaatattttataaatatctttataatgtggcttaatttttcagacatcttctgtgtagaaacaaatattcatatgtatgtacacatattagctattgctgtgtaataagccaccttgaaactcagtaggttaaaacaaccaacatactatttcaaatacatatgttagccaggaagttcttcaccttactgctaggattactcgtgtgtctctagttagctgggggttggctaaggggctttgctgatctcagctcagctctgcgaaatgtctggctgtctgctagtctgggaaaacttcatctgggacaactagggcaacttgactcggttccacttgtctcatcctcctgctgtctagctctgatgtgctcttacggtaaatgcagaggcatgaacaagagagcaaaagtgttcaagcccttttgaggtctacatttgggagaggaaatgccagcacttcaattgcactctgttggtcaaaatgagtcaaatgccaacccagatttaagaagcagggaaatagataccaacttttcatgagaagaacagcaatgctacattgcaaagggtatggattcaggaaaggatgaaatactaggcccaattttgtagttaacttaccatttacagcagttgctcctggacagtatggcttccttgccaaatatttttgcatgcaaataattggtaaacagtgccaatattggtttttcctaaacaatactatgttaaagtgtcagtcaaaatatgaattaaaaaatgcaaaacatggtaagagcttctcaaaattagttatgtttgaaagggtgaaaagaaaagacaagcagacatttgcctaagcagctttgggtggttaatcaagtcggtacactcggatggggtgtcttgtacctctctagtctcatgttccatccgtccacttacgttccaagaagtggcttatagttccttgaacagtgcgtctatttcatctgatccttagcatgtgaagtttcctctgcttgactttatcttccctttacacttctacctgttgataacctgttcaaccttgtatattctattcagggattttcactctgttgttctctccagtgaagatatcttttatttgtgccagcaccatacttacgacaaaaaaatcactattaataggattataacaccatgctataattatattcgcttaaatgtatatttccttcctaggctattacaaaagctgtgaaaacagtggcagtatgtttttatcttttatcttcccatttttcttaggacagtatgatgcataatactggttacatttagttgaatgactatccccctcgtctgacacataaggaaaataagccaagtgctatgtaatttatcagtgttcacacaactggcaaaatttaaattatagaactgtaataaataaaggcctatttgcttccagatactatattatttaacttacaactacaccgaatctcacatggaagactttcaagtaaggaactggcacttttcagtggatcttaagaaatggctacactaaatgccctagttaaactttttcttctgtttactactacctcatttaatccttatcaacttcaaggattatatttcttatattttgatttatatagccttaagtttttgttgaatgatatttcttctttagttaatataaaaagccacatttttcaaatacattagagtgaattatacattcgaacaatttgcagtgtgctctaaaatagtatttagtaattgagtctgctgagcacactggagtcctgaggagttaatgaaacccccgatgtcaaatgatataacaataggaatttgggactttgaagaattttcctaatgtatatatgtagaattatcactgttactatctttccattacaaatgggacctacaattaggagcaattttattggcaggctatataactgtatctgaccttttggaaatgatagaagaaagaaaagatatattaaactatctttgtagaaaagatgacgtaaaggctcaagtaaaactcacctaacccttgcccctgaatgtgatgatagtcaagcccagcttaaacagcagttgcaaagtaaagaatggtgtagagatctgtagatacactgcctaagtccaaattagtatctagcacttacttgctgtgtgaccttattcaagttacttatattgtgtctgtttcatcagttgtaaaatgggggtgactgtgaacattaaaacaacccacaaaaagtacacagaagtagcgctgacataaaccagtcgatgtgtgtaactcgcatctttctgatacatgaggtagagtcatataaaaattgtaatatttgacaatatttgacttcagaattggaaattgcataaagttggaccactaaaaggaaataaagcatagcagtgacagacgttctcctttaaatattttatcctctgtgacttttgacagaagatcttctttaaatattgtatcctatgtgacatttatcttttctgtgtttccaatttctttgatttggaacttcctgtagacagacccttacaggcatggaagaagaaagaatgaataaaccaaggatgacttcccagtaggtggaggatgggaataattaggaagaagctgtgtcttgtcacctatattgtccatacacaactgcaccgtagggtaattgagaaattataagaatggtaataaatacgttttacattcattaattaaagtcatctttggatgccctttgtccataatgtttcctctactagatctgaagcctaaatatcacttttcttctctgcaatttccctggaactgagtactcatagatgtttgtctagtgagccattccattatgtcatggtatatgtgtgtatttgtgtgtgtgtgtgtgtgtgtgtgtgtgtgtgtgtgtataaacacaatcttttttttttttttttgagacggagtctcactctgccacccaggctggagtgcagtggtgcaatcttggctcactgcaacctctgcctcccagattctctcccaccttagcctcccaagtagctgggacttcaggcgcgtgccaccatgcccagctaacttttgtatttttagtaaaggtggagtttcgccacgttggccaggctggtctcaaactcctggcttcaagtgatctgcccttctcggcctcccaaagtactggggttacaggcatgagccactgcgcctagcctatagatttcttttttgaagaatcagtgttatttgcatgctttgaaacaaagtgcttcatcttgccaaccttgtaccataccgtttctgtcagaaaagcaaccattgggatagattgtaattagccttcatttccatcactggctatctcaaatgcaaatcatgtatctatgtgaatcaaaagaaaaactggatttaggcctggtgcagtggctcatgcctgtaaatctcagcactttgggaggctgaggcaggtggatcacgaggtcaggaggtcgagaccagcctggctaacaaggtgaaaccccgtctctactaaaaatataaaaaaattagccaagcgtagtggctcgcgcctgtaatcccagctactagggacgcggaggcaggagaatcgcttgaacctgggaggcggaggttgcagtgagccaagatcacgccactacactccagccaaggtgacagagtctcaacaacaacaaaaaactgggtttaactttcagaatgttcaattttataggggatatttaaaggtggtgtaattagtataatcatggattgtaatcattccacaaattttaaaataactttgtgaattacattaatacataaaaatataagataaagcatttaccataattttattaatatttcctttagaatacctggtaaaatgaatgagtactgacctaacttaaagataaaacaattgagacctagctttagaagttagttttattacaaaacatgttaaggatagacctgatcagacaatgaatcatgctgactttttgttaagcatacttctgggttcataacatcccacttacatataacaacttgatttccattaacgatggtgtggtttcctatttaaagttcgaatgcacatctgtttgaatcatttctagtgtacttaatagagtaacatacatattgggttctagttaagatgctttataaaatgccaaataacattttatatctggagagattataaaaacttgtattttgtagctttgctcttgaacacttgctagctgcaaggaataacttggctttttcttgatgatcttcatagccagattttcgtgctttttttggtagagagaagtctctacaagtatttgacgctaaggaataatgaataaatacctactgattttatctgctaaggtccacaaaacattccagtattttgatatcactattaaagaagacgacggtgttccagtgatacatatgattccttacaatgacatcaccagagatagaaatatgaggcatgggaagtaacacgtaggccttcatttattttctgatatggacatccctggcattgatctccttggctcaaaggaaatttgcttccatgtctagggtggtgaatgtctttggcttatttctttggccctactctccacttttgtcttccttgggaggctgatgtctgtggactacatcaacaggctcctttgccctctggctactagttggatttggccaatgagagccttggtaagagagggagagaggaaagaaattccatcacccaatatcaaagctcctgtcagataatcttctcttctcagttctctctctatgtagtaactagaaaccactctccttcttttcattcttaggagtctaagagtagtagtgacacttctctattactagttccagtggtttcattataccttccctcatttttataaacagtcccttattaaactcttctcagattaccaaagtcctgctatggccatataaatttcaaaggagagtgtcattctccacctccaggtgataacatttaacaggagggaatgtaatttatttaatgtttttattgagcattttctatgctaggtaccataccagacatcttacatttattaacccttttaattctcatattttgaagttggtcccttctgttactttgaggccaacattacaaggaaagttatagacgatatggattatttggcttagaaagtttggaataaacgtgtgatagctaacacttacagaatatatcttacaaagtgccatactaagttcacttaaatctttgcaatatcaccacaacataggtaatgatacatgctctttctatagatgaaaagagtaaggcacggagaagttacttgcccaagatcacactgcagagctgggagttgaacccaaggcattctgggtgtacagtcaacattcttattcatggcatcataccattcccccgtgttttccaaagcatattttatcagtgtgacttttttctaaattccctctgcataaatctaatgtatttcagtcactagtattctaactcaaaatacaaaaccagcatttttctatctttaggtgactcctttcaagagaaaactaacctatgatgccacaagtcgtcatagtggccattcttgaggggagcttccacatagggggtgtgaggaagctgctagggtgttgatcatattctgtttcttaaatctcgatgctggtaatataaatatgttcggtttgtgacaattcattgagctgtacacttaagacgtgtactttcctctatgtatattattccgcaacagaatactgctttattatacaataccttttccaactcatatttaagaaaacaaaaaaaaaatcaactcggaaagcttcctatttacatgaaaatgggttgccttatttttctgggagctggtcagcagcgttcttcagtaagttttgaatccccagttttgcaattctttgtggtatttgcgatatttttggtgtttccaatgtctagggatttgtaattgcagaagtatcttgactttcttagcgacagttatgtccatggcttgtcctttttgtaatcagaaggtcatgctaaattatccctgtgttctttactttctactgaaacgtattgatccctttggattttcaggttaaaagaccaatacaactctgaagaatcagaaaccacttaaacaccttcacaaatgcatttcctttctcaaatttttttactttgatttgttccactttgatttggttcactttatttatgccacttgtcaacctacctatctgtgtttctttttgaacactgtttgtgcttccgtatttctttatttcatactaaaaaggatttggaaggaatactgtctcgtttttaggtcctttcgtgttgtggtttgggttaacaaagacaatatatatgcagatacattaaactgagtaatatcagatatccactcagttcacttgataagggaaatcttagtcataaaatgaactgaagacagagagctacagggtcgcctggcccaaggaggaattcatgttttgtgtgcttcacaaaatagttctcatacacttgaaaaggaagccattaaaggttgaattttaaagaaaaaatattgttcttaggatataaaatgccacctgcaacaaagacatggtgtatgttgaagatgaaaggggagaacaacaaaagaatacttaaaaatagtcaaaagaacaagaaaagggaggaaaaagcaagtttctaagtgcatcctctgtaccatctgcattcaccagttttagtaattgtatagggaataatgccttcccctattgacttgcactcccacagggatgccaaactaatagaaaacattttacatgtattctgcactttctaatataatatttttatattatcgaaaagactttaacttgtgtgtgtgtgtgtgtgtgtgtgtgtgtgtgtgtgtgtgtgtgtgtgtgagatcttgcttcgtcacaaaggccggagtgcagtggcacgatctcggctcactgcaacctccaccttcctagttctagcgattctcctgcctcagcctctcgagtagttgggatcacaggtgtgtgccaccacgcccagctaattcttgtatttttagtagagacatggtttgaccatgttggccaggctggtctcgaactcctgaccttaagtgagccacctgcctcagcgtcccaaagtgctaggattacaggtgtgagccactgcacctggccgagttaaacgtttttacacctagaatttggtcaaagaaagagatgcagacaaatagtgttaaaatgaaacataaaaatcaatctatatttattgagtgcatacgatttgccaaatctgtataacgttcctatgtgttgcagttgaacctcacgggagtgctctggagtaataatttgagccccattctaatagtgaataaattgtgcctcagaaaggctgtcacttgcccaagataacacagctagtgagtgagtgagagacctgagttcagaagttagctatttctgcttctgaaacttgggttacttttgctatagtatctataattctatagagtaagttgcaggcaggaaaattagaaccatccaagagaaatagtatgttagattttacctggggtattcatactacagggagaataaaactgagcaccgaaaggtctataaagttacaggctaaatgtagcacatttcactaaaaaaaaaaccacatcagaccgtgggaacgggggtgggggagatttttactcaaaagtacttaaaattacttttacataagtccaggtgtgatggctcatgcctgtaatcccagtactttgggaagctgagggaggcggatcacaaggtcaagagatggagacaagcctgaccaacatagtgaaaccccgtctctactaaaaatacaaaactgagctggacgtgatgacacatgcctgtagtcccagctacttgggaggctgaggcaggagaatcacttgaacctgggaggcggaggttgcagtgagccaagattgcgccactgcactccagcctggcaacagagcgagactctgtctcaaaaaataaatgataaataaatagttttacgttgaaacaagcatatattaaaagaagaaggcaaaatctctaggaatttttagcataaagtatatgctttcaaagaaatttaaaacctgcaggcactgtgtaatttatactgccagactccagggtaaattccttcaatttcatttcctggaaggatgctctggtagaatattctgagaagcactctattagagaatatggtgaatatgactaatagaaattggatttcaattgtgatactttaatatatcattgactctgtgagtttcgaaaataatacgatagcaggaactgtttctctatcacctcactgctttctctctctcggtgccccagctaggtgtacatggaatcccctacctgacctataatcctttactccctctccattttggttacctccagttttaaaagaagacttataaaagaccttggtctatgtatttaagtttggcccacaaagcaagattctgtctgcgtttttgacctttgcctagactttgtctccaaacccaaacgtagtccttgtgtcttggatgctatatgatcctgatggctttgggattcatgttttattctgtactccaagacttctctcacctttcccagtctctgctcctctttttgaataaacagcagtttatcacgcacatacttcttggtctgacagacttcaactttctaccctggattttttcttttcataaaaacaagtatctctgtcagttaacagttaactatattttcttcaacaatggacacattgcagtgcataagattattttttgatgagtttaaaagtcatgctttgctcagataagtgtgaaattttgctcctggccaaaggagggaaaaaaacacatcattttaatggcattgtataccttcattcaatttgaaaaacaaattattacactcaaaataccaaattattccaggttagatatgaagttcttggcagcactattagaaagtgtaaatttattttcttattactagagagctttccttaaagtttcattaaaatggcactgttttaagatttatgtgtatattatgtatagtaaagttgctttgttttagattaaatttatggatacatagtatatttagggggtaaatagatatattgatacaggcatgcgaagcataatcatatcagggtaagtgaagtatctgtcacctcaagaatgtatcctttctttgtgccacaaacattccacttcaaatttttttttttttttgagacgcagtcttgctctgtcacccagggtggagtgcagtgatgctatctgggctcattgcaagctccgcctcccgggttcacgccgttctcctgcctcagcctcccaagtagctgggactgcaggtgcccgccaccaagcccacctaattttttgtatttttagtagagacggggtttcactgtgttagccaggatggtctcgatctcctgacctcatgatccgcctgcctcggcctcccaaagtgttgggattacaggcgtgagccaccgtgcctggcccaaattcttaaatgtacagtaaattgttgactgtaatcaccctcttgtgttgccaaatagatcttactcattctaactagatttttgtacccactaaacattcccactcctcctgtccccaactacccatactacactctggtaaacatcattctactctctgtctccatgagttcaattgctttaatttttagttactgcatatgagtgagcccatgcaaagtttgtttttgtgcctggcttatttcacttaatacaatgtattccagttccatccacgttgttgcaaatgacagcgtctcatttttttttatgactgagtagtactccactacgtatatatgtaccacattttctttatccattcatttgttaatggatacttggattgcttccaaatcttggctattgtgaatagggttgcaataaacatgagggtgcagatatttctttgacaaactgatttcctttcttttgggtatatacccggcagtaggattgctggattatatggtagttctgttttcagtttttttgaagaacctcaaacagttcttcacagtggttctactactttacatccccaacaacgatgtaccaaggttcccttttccacacagccgcatcagcattgatgttgcctgtctgttggatataagccattttaactggggtgagatgatacctcattgtagttttgatttacatttctctgatcaatgatagtgacaaccttttcatattcctctttgacatttgtgtcatctcttgagaaatctctattcaaatttttgcccttctttcaatcagatgattatatatatttttttctatggagttgtttgagccccttatagattttggttattccttgtcaggtgggtagttggccagtattctctcctactctgtgtgttgtgtcttcactttgttgattgtattccttgctgtgtagaagctttttaacttgatgtctcatttgtgcatgtttgctttgattgcttgtgcttggtagggtattgctcaagaaatatttgcctagaccagtgtcttggagattttatcccaatgatttcttgtagtagtttcatagtttgaggccttagatttaagtctttgttccacttagattgatacttttgtatatggcgagagataagggtctaatttcattcttttgcatatccatatccagttttctcagcaccatttattgaaaagatggtcttttcttcagtgtatgttcttggcacctttgttaaaaatgagtttactttaggtctgtggagttgtgtctgggctctattctgttccattggtctatgtgtctgtttttatgccattagcatgcatttttggttagtatagctctgtagtataatttgaagtcaggtaatgggattcctagttttgtaaacaaggatcatttgattcttccttttcaatctggatgccctttgtttctttctttgatctagctaggacttgtagtaatatgttaaacaacagtagtgaaagtgggcatccttgttacagatcttagagaaaagtcttgtagtttttccccattcagtatgaaattagctgtgggtttctcatatgtggcttttactgtgttaaggtatgctgcttctatacccagttttgagagtttttatcatgaaggcatgttgaatttttatcaaatgctttttcagcatctattgaaatgatatggtttttgtccttcattctgttcatacgatctatcacattgattttttgcatatggtgacccatcttggcatccctaggacaaataccacttggttataacgaatgacctttttaatgttgtgttgaatttggtttgctagtattttgttgaggatttttgtatcagtatttgtcagagataatagcctgcagttttgttttctggatatctgtctggttttcgtgtcaggctaatattggcctcacagaatgagttcagaagtacttcctcctcctctttttcacaatagtttgagtattaggtgtttcaatgtttggtaacattcagcagtgaagccatcaggtctcgggcttttcttcactgggagactttttacatctttgatctcattacttgttgttggtctgttcgggttttgcatgtcttcatgacacaatctaattttgagtttggtttgctattctagttctttaagatgtattgtttctcttttttttttttttttgatacaagtgcttattgctgtaaactttgctagtactgatttatctgtagcccacaagttttagtatgctgtgtttacagttttgtttcaagaaattttataacttccttatgaatttcttcattgacccactgatcattcaagagaatatagattaattcccttgtgttttgtataattttcaaaattcctcattactgatttctcagttcattcaactgtggtcagataagatactttatatttcaattttttgaatttaaggcttgttttgtggcctaacatatggcccatccttgagaatcctccatgtggtgatgagaggaatgtacactctgcagctgttggttgaaatgttctgtaaatatttattaggtacatttagtctgtagtacagattaagttcaatgtttcctagttgactttttgcctgatgacgtccaaggctgaaagtggggtattgaggtttccagctctctttaggtctaataatgttgctttatatatctgggtgctccggtgttcggtacgtatatatttacaattggtatatcttattgctgaaatgattcctttattatatgttgatctttgtctcttcttacagtttgtcttgaaatatattttgtttgatgtaagaatagctactcctgttcttttttggttgctatcgacatggaatatctttttacatcccttaattttaagtctggctttgtaggtgaagcgtgtttcttgtaggcaacagattgagtcttggtgtttgttgttgttgttgttgtttgtttttttttttttttttctgtcactgtgttttgattggagagtttatttcatttatgttcagttttattattaagaacttattcctaccattttgttttctggttgttttgtggctttctcttccatcctgtcttcctttttagtgaaggcgatttttctctagtggcatgcttttatttcttgctttttaaattttgtgaatcttagtatatcttcttatttgaggctaccatgaggtttacaaacactataacccattatttcaaacagacaacactggttgcataaacaagaaagcaaagagaaaactaattaaaaactcaaacttcgtctcttttaatctttttgttgtttgtttatatctcattatactgtctatgtcttaaagttattagagttatttgttaactgaaagcttcctttttttactcttcttattcaagatatgagtagttcatacatcacaattacagtattacaatagtttgtgtttgtctgtacttactgagttttgtgccttcagatggtttttctggctagttaaggtcctcttctttccagttgataaattctctttagcatttcttgtagaacaggtctggtgttgatgaaatcccacagcttctgtcttggaaggtctttatctttcttgttggaaggagattttcactggatgcactatcctagcataaagggtcttttccttcagcactttaaatatggcatgacatgtcttagcctgtaagttttctgctgagaagcctgttactagttgttgttaagctttttggaatgtatcttttctcttgctgcttttaggatcctgtctttatccttgacttttgatgcttgccatctaggagccaaggcctgaagttgcatctttatgaatctatctggtgctctcttctattgtggcagagctggcacccaagccacaatacaaagtttgtcccattcttcctttcccatttcataagcagaggaatttttccccatggctaccactgcctcaggctcatggtgagtactgcctggctaccactgatgttcactcaaggcccaagagctttttagttaactaggagtaaacgctgcgaggcctgggtctctccgttctgtgcagtgggttctcctcaggccccaggtgagtccagaaatgccatccaggagccaaggcctgcaatcagagaacccaggagcttgcttgatggtctacctgactgtggttgagctagtacccaagctgcaagacaaagtccactctattgcctctcctttccaaaagcacaaggagtatatccccatggccaccacacttgggaatgcattgggccacacccaaagacagcatggctctgagtcttacccaagacttggtgaatactgcctggctactactgctgcttattcaggacccagggactctttagtcagcaggtgacgaattctaccaggactggattcttctcttcaaggtagcaagttcccttctggccctgggtgtatttaagaatgtcactcaggagccagggcctggaatggggggtctcaggactctgcctgatgccttatcctactgtggttgagcttgtgtccaagttgcaagacaatgtcatctttactgtccctatcctctcctcaagtggaagaagcagtctctctcaaagctgtcagctgcactgttaggggttagaggatggggtggtacaagcactggtgtcttactgggttgtgtgcccaccaagtcccctgacttcgagtccagcacgacaccaagacttgcccaggaattgcagtttttgtagcctagactccctttgaagtttatttaggaccccaaagtgcttgagctcacactggtgagactagctggaactcagcttctaactgctgagatgggtgatacctccctggatagggctggtctaaatgtgccctctatgtgcgcttgatgaattctgccctgtgttgcttcccactgtgacagggcagcactgggttccaatgcaacgtttcacaatcctgcgccctccctcctgcaagcacacagatcgtctacatgagacatggcctctgccaggggatgggggaggggtggtgttggcaattcgtaactgtctttcctaccatcttcagtgcctctttccttgatatgatattaaaatcaagtactgtgattgctcacttgatttttggtttttatgtaggtgcttgcttgtgtggctatctgttcagtttggtgtttctatagcagcggtagcgggaaagatgattgctggaaggttccatgtatttgaccgtcttgttctgcctccctcctagtaaagctattctttaaaaattctagcatgttagggttttgtgttatgttctttttcccatggaatttgaaaatggatctatttgagtagaatttcaaaagaataactcataatttttgtctaagtatatatgtggctggattcacaaagctgggcacacagggactggttggttgccgcaggtatcattgttccctgcttgaagtacccgggcatttacaggtcttgtcattgacatggctacctggttgtaggaatagtctaaatcctatgtttttaatcgtggaagtttaagggatgtcttttgcctggaaaccagggattttcttgacttgtgtgaaattcaaagtttatatgtgatccaaggagtgtatgtaaagagcacagtcacccaaaggctaatgttagacccatcacctgacgttttttggaaagtatttgttgatcccaaggcttgtgagagctcccactgttacatgttctttagtcctttctaatgcttctatgtaatagtaccttttaggaatattttctttgctggactctaagttctatagggtctgggcctatgtctgatgtactagcatatgattcagtacctagctcaggtttattcatgctcaatatgtctttgactgattaaattagggatttccagataggtgatgaaaaagctgggaattacctcatgaggggattgtagggttttaagcagaaaacgatttggtgaagtatgacaaaagaaagacaaatgttagaaagataatcaaatagtaggttataaaaggacaaggaagcaacataagattgaaagaacaagaacccagaattagacagatctgagccataattttggctttaccccattctagtttcatgacaaagagccacatactcatcttacatgagatacttagaggttaagtatgttactgctaatctcagaaatgccacaacggttatgaaatccactcatttaatagtgtgtctcatgagtatttacgttaaaaatgttaaatattatttattgactattatttttccttagtataattcctgagcaaagaactgagtaaaatagatgaaaagctctcacagggttgtttcaaacctaattaaacccgatattcctaaaatttgagttatccagtatgagaataggtcatagcatgcaaaatgtgtatgcacagcaagcatgttttgagtgataaggatgtcgaaccactctgactggtatattccaagaatggttaaactttatgtacccacccaggtagattgtggtcttttgcttctttgtgtatttacttttccctttacccgtaactgccttgatcatgcctgtattttttctctccttcatagaatctatattcatttcagtgaattaattagatcatttagggtataaatctcttactcttgctattcaaactaattcaaatagacttgacctatgataaaatttttaaattttttttgtcatttgaactttccttttttcatccgtcatcttcggcagattaattatgcacactaattatccttaaatatagctttagttttcaaaaggggataatcgtgaaaatgtatcattggaagtgtgctttgttaaattgagtgtattttttttaatttcagtttgggaagcagcatattgagaacctcttcagtgacctacaggatgggaggcgcctcctagacctcctcgaaggcctgacagggcaaaaactggtatgtgacttatttttaagaaagttaactttaaacttagtagaatttcagaccagaaactgacaacatagttttatgacatctagtagaatgactaggtactgattgaaacagcaatacctattccttagtaaagcaacctcgtatgattttcatttggcatactctaccgcctgcagaaaaagtaaaaatttcagtaatacaatttatattaatagatattattcagttttactacttggtatctatcttatcaaatatcttaatgaaggcttttatacataatgacttgagaaattatctttgtacttttgtgtatttttgaagttattttacaaggaacctgtatgagtttatacatgtgggatagcaaaataaggtacaggcattatagtgtaatacgtgatagcatatgtgatgaaaatatcacttcctcttgaactattatcttgtctaacttcagagcattcctgtgaagatacatgattgatatacatgattacagatcagtgaagtcatgttgatcaaggtcttacactggggggggaaagaactcaaattgaaatcccctgactgaaataatcgtcttagattgctattctaaaaagtagagtttaagcccccagtctatagtcataaataactgttctacctatcaaattctgctaaatcatagccttcgtctcttatctttgcccttcattacaactccccagcacatgcacatacacacacagacacacacagattttgtcatattatacaaactgaagctgtcgttcaaagtcagttagcaaaaatcctatctaccccagcctgcctcctgtaacacttaacgctaagccactcttttctcggtatatattgtcagatatctctgggtttttgcctgtattattttacttgcctgtatttctttttgtacttctgtctaccccaactgtctgccagaaaccttgatttcacctcagtaaagcttttcccaaattacctttgctaatttttccctcccaaattccacagaaggcccatttttgtcttgtttttagtgtatgtatgactgacatccctcctcaattaaattctgaagtcctatacagaagagacatacctatgctttcattttttatcttcagctatgtgagattaatactaaaacggatccatttttttcaagaagtctgaacttgtactaatagaagaacaacttgatgacatattgaaataataactttagtcaagggggaaaatcagatttaataccttatagctgaactgtttgctgggcgccaatttgaggtcatcatgtaaacttggtcttaatttcactagttagagatagatttgtgtgtaattcatctcctatgactgtgaacaatttacatatatatggatacgtagcatatgtacagaaatcagtgtgtctgtgtatctcgtttctcctgtattctgaagtcagtcctactttgttaccgaatacagaagtcccagtgtcttccaaatgttcgtgaaaaatctttcaaagattatggcttactcatcttgtcctggccctctgttaggaggctgttgtctcttcacttccaggtatctgcgtgatcacttctcctgtgttgcaatcctctggtcatttccctgactgagtcaatccatctatcacccaaagcaatttagtcagggttaacaaatttcatacataatgtttaagataatgaatttcagatcctttcgtaattcataagcatgatttgggtgtttatactcagatatgagataagcctttctctaaacttatgatgttggcacactacccatttgatataaagaaaaaaccactaatttcggcaaaattaaaaaatccacatgatttgcatttatgcatatacatacatagacgctaagacaaaatgaacctaattagtaatagcattaaagaaaaaaatatcaaacaaaatatccatgagattggccagtataaggtaagctagtggtagggaaaaatcaccaaacatttacacatggcagtgtagattacataatttcagatactgctactaacagaatccattcaccattgtttgtcctaatcacagatctgtcagccctggtctgaggattttgcctttctcataaagcagaatcacctctaacaaatgctcccgatcccagaactccaattcgctatgccttgtcttgaattctaatagtttctgtagagatatatcttctactcctaatgggaggcatgtatactatagaacagaaattttagtattctactcagaagcatctgcatttggattattggctcaggacatccccagggttaaaaggaaggtacttgccttacaatcataaaataagaaatactccccaaggagactctaataggggcagattttaagttcccacttcaggatcagaaactgcagctttttaaaagagtagactatgtttggttctaatacatatgcacatgtgtacatttaatgtttgaatatgatacaaaggaaaattttgctaaatcttgtgactatataattacataattgaaaggaaatatgtggctttggtctaactactaggcagagaactgatttgagtaattattttcaaaactttaaagtcctataattaccattaaacttgtatactgtcaatctatatatacacaagaagattggttatttgctgtttttctttcatgtattttttttttattttgatggaatcttactctgtcgcccaggctggagtcagcgacatgatcttggctcactgcaacctctgcctcctgggttcaagcaattttcctgcctcggcctcccaagtagctgagactacaggcatgttccatcatgcctggctaagttttgtatttttagtagacatggggtttcaccatgttggccaggctggtcttgagctcctgatctcaatgagccacctgcctcagcctccccaaatgtctggctgttgcttttttttttttttttttttttttaaatctaaagtcttatttttttcctctttttggtggaaagtgggagaaatatcagaatgtaaaccaacatcattctgacattcttggaggaaaatctaagaggtaaaaatggagattctggttcataaggttagccttaatgttttgtgaaatcaaaggaacaagatgtcaatactgtgttataaaggatatcaggcaagttaccttggagagtaagatggctttagcttaatttgggttgttcagcaggcagtgcaaatgataaggagttctagggtgaggaactacttgagaaagaccaggagctttgctggaaagtataggagttaaatgcaagacacagaaatatagatatttgtttggtgcatgcacaaggtagttagagaagaaggaaataaatttgcaagactggggctctacagacacagacaaaagtttgggtcctggctccaccaattattagttatatggtaatctatatattagatattttaacctgaggttcacttctgtacaatagggatgaaactaactgccttgcaaggcggggattaaaggtagtgcattcaaagtacttggcacatactacgaagtcaataatatttatgttggaccaactatgtgacaagcaccaatcttagtgctttatgcatatcgacacactgaattctgccagaaaccatatgtacaatggtttgagcaatatgaacaataagtagtgccctggacaaggtctggatcctgtgagacagcatgcttcatgtttgagtgagggctttgacctcaaatgcagagaagaaagtatgtcgaattctcttgtaaatcagagcagttgttattgagagcacatgttgtaacttgtgtatgcctcttgctaatattttcattaagtccatttttaacagatgagaaaactggtatacagggagattaaattttttatgtaggccagacagcacaaaaacagcagagctgacaattgaacccaggcagtcagctttgtagctcttgcccttaactgttacctataatcacccaaatgtttaggtgagaactttgcaagtggtttgcattggcagtgggcttacttcaggaacgtcattgttgatggtatgaaggaaggatgaaaaaaatggtgagtgagtggagaagggaaagaggttagatttctctgggcaatagctaataagggcttgtagtaaggtaaaagaaatgaaaatgagagtaaataaaacaggttatcataatggtagaatttctaaaactctacaacttaataaatgagttaatttgtatattacaatgaactatgcagatgttggtttaaaaattacaggataagatacaacttttgggattgagaataaaattagggaaccaaagtgattgaggtttagagcttcagtgacaaggacaattaaggtaatcttcacagaaaaggtttcctttaaccctatttggcattatataattttgctagagtcaaatctcctttagatttttctaaaaagtttgggaattgtttttctatcttactagaaaatgtttttatgcatgctgatgtttctgtcattggtggtcatgcagtaatccccaactgggctatagaatgaagaaacaatcataccaaaataggctttgtaaagaaaaagtgttgccattcttagagtggttggtttatgctaaaaacgtaccaggccaaggacaattagcgcaaagtatttagattcattatattaatgcctcacaggctctgttcgtttacaatattcaagcttaatagtgaaattataaatggtttcatttctagtagattgtcggtctctctgctggtcagtgaacactcttttgttttgttctcagccaaaagaaaaaggatccacaagagttcatgccctgaacaatgtcaacaaggcactgcgggttttgcagaacaataatgtaagtagtaccctggacaaggtctggatgctgtgacacagcatgcttcatgtttgagtgagggctttggccccaaatgcagagaaagtatttcaaattctcttgtaaatcagaccagttcttactgagagcacatgttgtaattcgtgtatgcctgattgtggctaatataattcaggaagcaaatgcatgctgccacagagggaagggaaaagacatagacctgacctgataggctgctccctgttttcagattttacttcatgaagctgtgtttggtggacaaagtcctgcagtcaactcggtttcttttcttactttgcttttctttttcttttttcttttcttttcttttcttttctttttttttttttttgagatggagtctcgctcttctgtcccaggctggagtgcagtggcgtgatctcggctcactgcaaactctgccttccaggtttaagctattctcctgtctcagcctcccgagtagctgggattacaggcacatgccactatggccagctaatttttgtatttttagtagagacagggtttcaccatgttggccaaggctagtctcgaactcctgacctcaggtgatccacctgcctcagcctcccgaagtgctgagattacaggcgtgagccaccgtgcccggtgaactctgtttcttacggcagtgttttgtgcaacaaacggatttttctataccaaatatttatgtactaaatgtgttcaaacctgataatgatgtttgtttaaatcaagccaacacttattaaacgctgtctccaagcatataaattatacagaaacatcactatttttacttggggtatgaatggcagatttgtttttttggtttagatttaactggattaaaatacgtgtgttgcattagaagaagtaaacagtcacagctaaaccaagtaggcaggtcagaggaattctaatctcctctgaaccacttggtgactcttcccctgtgtcatggcattggaggcagccttcctttcttattaacatcctaaaatctgtctaatcgaccaatacatttcaccaggcacttagtagctccctaattacattacctctctctttcaaagataaactcaagtacattgagtacgttgatcacttactcttaaaataaccataagcagggatagattaataataacatgtactcccccaaatgttgctcagcttatctggcagggagatgacattacataagatatggaaatggaaactgtgcagcaattaattggctgattttatgaattcagggtcattgtcacctttaacctatgaaagttattttacagagatgtttgtcttaggaagaaattaactagatttttcactccgcagccagaataatctatgagctgattttcttgtttattagtccgatggactctttggaaatatcagtgtcattgacattatgagaattgttaacaatattaaagttacacaaagaaaatgtctttgaaatatcaaaatatcatattctgtttcaaaatgtagcagtgaagaaaagagcggaacacagaattattagatttaatttatttgtagcttgactgtccccagcaagaaaatgtcatttaaaaaaacaaactttgggatatcctgtaaaactcaatcctgcataaagaaaatgcggtacaggtcgggcgcggtgctcatgcctgtaatcccagcactgtgggaggccgaggctggcagatcaccagaggtcaggagttcgagaccagcctggccaccatggcgaaaccccgtctctactaaaaaatacaaaaattagctgagtatgctggtgcatgcctgtaatcccagctactcgggaggctgaggtaggagaattgcttgaacccagaggctgaggttgcagtgagtggagatcgtgccactgcactccagcctgggaggcagagcgagattccatatcaaaaaaaaaaataataataatttggtacatatacagcatgaaatacaatactatgcagccacagaaaagaattagatcatgtcctttgcagcaacatggatgagtctggaggtcattatcctaagtaaactaacacagaaacagaaaaccgaataacacatattctcaataagtacgagctaaacactgaatgcacacgaacacaagggaacaaagagccagcagcagctagtgctggggaactttgagactcctacgtgataaatcatgaaagggtgtatggggggggtcttacttgcaagtatgttttgggaggttttttgggcacacatgctctggttgtacatgctagcacacataccacatctcattggcatctaaaatctccacccaggggtgtgtgggtttttttgtttgtttgtttgtttacactattacaatgagcaaaagaatagggcaagtttttggaggagtgtgtgcatgcttgtcagtggggaaaatccctagcgtggttatctctggcgagggcctgagaagtcccctttggggctagaggagcccaaccacaaggctagacataatcagtgtggacagtgtgtgtattcattgtccgtttcgctgattgtcaacaggcagcactgactcagtgaaacagcatcttcaggacttcttttctcaatggggctcccttgcctgctcatttctggctatctgcctactccaagggaaccagaaaaatcctggcaataaaacatatagaaggaaatttatatgactttgggataggcaagtatttatgatacctgaatccaaagcatgtttcaaaaagagaaaagttaacttggacttcatcaaaattgagttattgctatattctggatatgagccctttgttttgagttgcaaatgtattttccttttctgtggattacctttttactcacttcaatggttaatattaataaaaacaagttctccacttggatatagtttattctttaaaactttatatttttatgacctgttgaagaaatactggcctacccaaagccattatgatactatattaggttattatctatagaaccattatcgttttaccattttgtttttggatctgttttacctgaaattgattattgcatatggtgtgaggaataggttaagactcagtatttattttatttgaagtctaattaacacaccatttattaaaaataatgcttcctcattgcttcacagtactaagtgtgtcattaaaaatttgtccgtacatatgtgggtctgtttttgcacttcaattctcttgcattgttctctctctctctacacacacaaatatcatgtaatgtggagtaatgtagttttataatacagcctagtatctggtgaactaggttctcccactttgttcgagattttattggttattggccctttctatttttgtatttgttttgtaatcttttccatttacatgtacattcattttaagtatgattaacattgagttaaatctatagagaataactgacacatttacatatggagtatcccagtcttctgtttttcttgattttttttttaaattttaggttttctagaatgagaaactgaaattgaacaggaacacaaaaggtgttcacaaattcaagaatcatatttaagaaatgtttaacctcagcagtaacttgaggaaatttaaattagagctgtaatgagataccagtacaaaattaccaaaatgactgaactagactactaatgccaaatgttgatgaggacatggatcaactggaaatctcacaattaacttctggaaatataattcaggcaactaattaaagagttgggcatgatctactaaatgtgaaaatgcacatttcttaccacccagcaattctattgtagacatacaagttacagaaatacatttcccagtttgccaaaaacacatatatatgtgagaatgttcatagcagtttcatttgtgatagcccaaactggaagtgactatgatacattctcatgatgggatattacagagcaatgaaaatgaccaaatgatagctacacacaatatacaagatgaagtcgttaaaatgtatttgagtgaaataaatcagacaaattatacctactatgatttctttcaattaaatttcaaaaacgggcaaaatgtttccatgggtttaaaattgaagagagtggttaacttttggaaggagtaagtcagtaaaacgcataagagaatcttctgcggtgctcactgttccatgttttgacctgatagctgttacacatgtgtatttactgtaagaaaacgcatcaagttgtacacttatgtatatttttctatatgcatattccacttcaattaaaagaggaacttatgaagggaacttaaaacctccgaaactccacgggccatatatagaaatctgatcatagaccccatgttttctaatgaaattattaaatgaatataagtgaatataaaattagaatatgatgtcatatgaatctcttcagggaaggccacatttcttacagaaaatatagaacctcctaatgttttagtagggaaaaggccccaaaataatggcttaaatttgagaaggagttgttcaaaagcagatattaacaatgctttcatctgagctagagctttaatggggagctgcataagatgctggcctatgcgttagaggacaaaacctcaagacattctcatgcagaaaccaaacttggaacaaaggaacctttaccttagcctgtggctgaacaataacacatggattttcaaaagtaaatctaggctgggcgcggtggctcatgcctgtaataccagcactttgggtggtccaggcgggtggatcatgatgtcaagaaattgagaccatcctggccaacatggtgaaaccccatctctactaaaaacacaaaaattagctgagcgtggtggtgtgcatctgtagtcccagctactcatgaggctgaggcaggagaatcacgtgaacctgggagcagaggttgcagtgagtggagatcgtgccactgcactccagcctggccacagagtgaaaaaaaaaaaatgcattatcttataattctccattttgtcataagtataaacaaaaatggaaaacatccataagtacaactttagtttgcttattaggaagaataaatcaaaatgctcaagcaggattttttttctaaagttgagcttgggtgtgttctatatcaataagcctgtgcaggatataaataatcacattgaagaagtcctatccaaatttccttttaaaattcacaggtatataagttgattgattggtgtcagagcaaacacaaccctttgtgtgtcagagattacagccacatggtaggcaatatgaagcatatatacttaggaacagttaagtgaataaaaaagagatacatagaataagaggtctgagaagaccttttggttcagttcctatatgagcagagacctggagaaagggagtgagccttggaattgtctataggaaggtgggttaggcacggtaataaagaccttaaggtgaaaaagcatttggaatgaggcctcagcaagtggagtagagtgagtttagagataaaggaaacatagcagagataggggagcagagaggtagtaaggtgggggtgagaagaagaaagcatggtgagccattgttggcatttggactcaggtctaaatgagatgacaatgactaaaaaaacactactagaaattaaatgggtcataagtcaggttattttaaaaatcagtaatagttccaagtctttgctattgtgaatagtgccacaatgaacagatgtgtgcatgtgtcttcatagtagaatgatttataatcctttggatatatacccagtaacaggattgctgggtcaaatggtatttctagttccagatccttgaggaatcaccacactgtcttccacaatggttgaactaatttacattcccaccaacagtgtaaaagcattcctatttctccatattctctccagcatcttttgctgactttttaatgattgccattctaactgttgttaaatggtatctcattgtggttttgatttgcatttttctaatgacaagtgataagcattttttcgtatgtatgttggccaaatgtccatcagtgatagactggattaagaaaatgtggtacatatacaccatggaatactatgcagccataaaaaaagaatgagttcatgtcctttgcagggacatggatgaagctggaaaccatcattctcagcaaactaacacaagaacagaaaaccaaacaccgcatgttctgactcataagtggtagctgaacaatgagaacatatggacattaggaggggaacgtcacacaccatggcctgtcagagggtggggggctaggggagggatagaattaggagaaatacctaatgtaggtgacgggtctatgggtacagcaaaccactatcgcaggtgtataactatgtaacaaacctgcacatgtaccccagaacttaaagaataataaaaaatataaaacaggaaaaatcagacaaaatgaaaaatcagtgatagaatactaacaaacttagagtgtcattttattcaagaaagttacagtcaataacgaaaacgtatcgcacagtagaaatgctgctaaatccatgaagaaaaattgatggaaatatatttttagagccattaattcaccactgtcaagtttatgacatatttaacagcaaaagattgagagtacaaataactgtaggtttaatagtgattttctgtatctcaacactaaagcatagtagatacttctataaaatatgagcattatcaataaatctccctatgaagttggatgtgcaagaagagcaatagtttaaaaatttcagttacattaactaaattcaagtctgaactctcaacaaggcattcagaaaatcgtatgtctgtcattattgggaatgctctcccctgagcctatggaatggccagagctcagtagatccacatggtgtctttcatagggcaaaagcattttcattttcagttcattgaggcaaccaagtgatacattcactatacaattttaaggtatcttgtgaagtcaagtgtattaactgtcctgatattaaacacgtggcatacagaaaaagttgaagagagtgtaatcaggggaatatttatagaaacgtggggaggattaaaggaagaaactatggtgaagaatgcagggattcacatgagttaataacctttactacatctaaacctaagcagtcaaggggagagggctattaatttgataaaatccctcatgttgggagagcgccactggacacaactgtgaactgagcccctaggtatctaaagaatgctgttagtttcaaatcattgcctggtgaagttgagagaagtgataccttagtctctccatagaatcctccagtgttttgccagtgccgctccttagtttagtctaaccagaagtccaaggttaagagattccaggtgatgtagtcatcacatacaaagaagaggtgaagaagtttggtgggttagtgaagtaggagtggaaaacggtataatcggcattccaggtatctagttctgttttgtttctgtgcgaaatgaggacttgagaatctgcatgccgagaactctgatgttggctagggcccagtcttgttggatgcatcaggaagccagtcacctttgaggccataccacttctatttgatgacagagagtagacgtggtttctggctaatttggggactaaggactccttcctattcttctggagacaaccagagccagaaaagaaagacacgctgagagtcacttcggatatctgctcttcgtcgtaaacttgttaaaggcttaggaaaatagtaaaaaaaatttcctgccacatacacaaattataaacgggcaatatatttgaatgcagtgaaaatgtcattaaatacacacaaactttcaaaattcatgttatttaataacagtagaaactaataatatacttataaattaagtttgattaaggtttgttaaaccaagagtataaaactacatttgtgaaggaaaaagcattccatatgaaaacccatgagaaatggctcaggctgtactgagagtttgaatttttgtctttgattttgatcttcattaaaaagataaattgaatcaagctttcaaataaaaatgttacaaaaatgctttaaggaaagcaggaactaaagataaagaaatagaagaaacactagataaaatatacagctagttccttataatatgaaatagattaatatcttatgaatgtgatccagacaaggagggagaaaaacaaatgtatgcagtttaaaaatggaagggaaatattaagtatgagatatagaaaccaaaaacgggttttacacagaaatacatatatgtttattataaaaaatgaagttgaggccgagcgtggtggctcacacctgtaatcccagcactttgggaggctggggcgggcagatcacctgaggtcaggagttcgagaccatcctggccaacatggcaaaaccccgtctctactaaaaaaaaaaaaattagacgggtgtggtggctggcgcctgtaattccagctactggggaggctgaggcatgagaatcacttgaacccatgaggcggaggttgcactgagaggtgatcataccactgcactctagtctgggggatcgagcaagacttgtctccaaaaaaaaaaatttttttttgaataccagtgataagtttgtccacacaccaagaaattgataattgctaatagaaaatcatatgaacagcctcctaattctataaacctatgaaaagaaaccctggtttaaaaaaatcactcaaaatttagccctctgatttttaaaggaatattagaagtgtcttttcaaaatgatactttttggtaatttctggatcattaagtcaaggtcattttgtcttctctcttttccttagggtctcctccattttagcctgtccctctgccataaatcactagttctagcatattctgtagttctaaactagctcctcagtttaaccctgttcctcagtttctttcctttccctgtcctggcgtttaacctgttatcctcacttgaatgccactcagcttatatctgtagagctcagacactacgtctgtgttccaatttgcattctttgtggtggctgttttagcatgaagttatccctgctgtcaataatgtattttggaaagccacttattgagaagaaagtacttctaagtgcagtgataactttattgcggtatttgctgagagcaaagctcatttgtaatagttggttgtgattttaaaaagcgaacaaaatacaaaatcctgagaaatgggagactatgctactaagtggttattcttgtctctacatcagctctaggtaaaaatgtatccacagcttctttttatttacaagtttttgaaggtaaagcaaatcccagctaggatgaaacatctcttatacagccattctattatttctttgccctgtcccacttttgtttgtaagtagtgcctttcattaggcattttaaattcagttctacacttaactctattctctcaaagatatttaatgggtaatttaaactttccttggatataactaagttctaatcagtgagtattctctattagatatttgcacttttaataattttgtgtctagtttaatgattaattttttgtctggtaaaggaacttagaaattacaaatttgatagagatttaactgtggtgctttaaactaccccccgctccccaagatgtattatgatctgtcttcctttctccaagcttgtgtcctcgtcttccctcttatgatttccttgcttacattttatgaattccgatcccttttataaagattcatacaaaaggtatagtgttgaaatataccctaggaacattaccaagacttcgctgacttaatataatttaatattaactgacacagttgtagatctaataattatgttcattgtaccagctcatcaattgtctatcacaaggtggtaagtttttaccaagtaacttcaaatctacaatgtgggatactacaaagcaaatagtcattgctatacattaaatcacaaatccaaggtgagtatttaaaaagcctagggtggaaattcagatgacagctatgttcaaatattcacttaaccccatcattgaaaatagtcactgaattagattgaatggttgtcagatgtcactgatctgaaaaatgatatactgttcacatgctggcatataatgttagataaagaggattctaaaatgttctttaaaactagtattttatgtgtcctttaagtattcagaaacttaaatagccatataatacatattttggagcatgtcagaatatatttgactataaactacttctatttattactcataaaatctagtatttaagtacaaattccaaatttaatttgttagacaagtatttcttacacaaaattgtcagtccacacaataggcctgtaaaatatttgcactttatatgtattaattctcaagtttgcagaagaggtagatcttgttaactctgtaacttatcaactatagggtctttgccaaatgattccgtgactttgactcactttatcatctgcgaaatgcattaatagtaaatgttcacttctttcaaaatacttgttatggaagatacaaatatacaaacataatctcgtattcattaaactcacattcagttgcaaggtaatataactactcttaaattgcagcatgttctcatttaaaataattttctgggtgagttgtttattcttcccatcccccttagtatacctcttgctttaagggaaattagtattgacacatttcttgtatattcaacttcaaattgagatagccagttacctattatgttcacatatggaggtctgctgggataataattatataactataaatagtactgtttaaaaatatttcttataatgtcactcaagtatcttttaagatttttattgtagctattgcttttttttttttttttttacttgaaattagtatacgtgacttgagcttaaaaagttggggctatatgggttgatttttgtcgttaaagttacatcctatattgccagataaaagatacgtaattacaaaaattcaaattaaataatatactgaaagtatatatatctttcatactaaattgtgaaagtattgaggacagtgtccatttactcaggcaatgccctctaatatatattctatataaggaattttgttgagtttagttaaaagagctactttcccaaaaagtttagtttgcattttattaatacgttcaaccagattacctgtatcaaaacttctattttgataaatttgttttaatgtctttcatgccattaaatgttcatattttcttaggattatgagacacttgtattaactgcctcaattctttattgtcaaagaggcagtatataaacaaatgaaaacatgactccattaaaaataattctcctgcaatgtatcagagtgatcataaacatatctgaaatatagaggaaatttaacatttcacttgtccataagcaatttgttgaaagtctattttttaaatttattcttaacattctatgcgtggcatatagtgagtggtcaaaaatagttaaagaatgactaaatatgtaaaacttaatcattgaaggtagagatagtatctttgtagtgagtacccagaattaaatcttgtaatatagttgaggtcaaaatgtgcttcaaaaattatctaatgtaaatttctatatctgaatcaaaaataattcttgaaatacggagataaggaagggaataaaaagctgtcattggaaatccaggtccacagtggcaatatggcccaccgtttaggttgtatatatcgacgtatttatgatttaataagaaaaagattcaatacatgcatctctcaatggaagaaaataggtatgatttatgcccataagtcttgaaattttaaacagtgtaaatcttaaatgtggtgtaaaagcacatgctgcagggcaatgaaactactttgcctttcctgtattttttatctttttaaaatgcattatatttagaaggattgtatgaatacttgagaagtttctcttgaatatggagaagtctttagcttggctacatgatggcagacatcttataaaagacatttaacatgtttaaaaagcaaattctgtttatctagaatgttggaaggaacttctcggtttatatatattttatgagaacgaaatgaaatgaaaagaaatgaaagaaccaaatagatggtggaagtacatgcttgaggtttcagtgtcaggaaggatatttacataataattttcaatgcatgggatttcccttttagttattgtttaagattctgtttaaggaaatcaactcaaacttttaaggatatttcagggttcctttcagaatctttttgtgaaattattttataatagtttgtaccatttcatatctagttaaaatcaccaagactgagtgaaaaggtagcttacccttatccccctcccttagctaattttaaaaatgcttgtattttacactgcatatgagggaacaaaagtgactccttcttaggacaaatatcaaactctgaaatgatctgggagaaccaattcctttgaaacaaatgtgagaaacgacctgctttagtctaatttcaattggctgaatgacgcaggacgtgttttcattagagcctgtagctctgaaatgtccttgtcactggttgtctaaaaaggcaagaagaggcagacaccatatattataaagatgatggttcccctgtgaatgagatataactttctgcaacttccaagttaaaaccgcaaatgcttaaatgatacacaaaactctaaacatccatctctctctgcatctaacaaaaataaaattgtatgaaaaaattcattaaagctttgtcagaactttgtcacctgtctttttctctctctcatacacaaaccacacatcacacacacacacacacacacacacacacacacacacacacacacacacgtaaatatcttacaggaatgtaactcttagttttattcatcattttcccttctctctctccttctgctctgccctaagaacttccattttcattatttgacttggttattgaaattattttcaagttacatgcccctcattctgacgtcttatttactattttctgtttgatgaaccctagtctgctattcttctttctgtaaagcaaatcaaaaataacactaacttgttcctgtcaataatctttcagaaaaccatcatatttcaggtttactttcatcttaagtttttcttaagtattcttaaatcttgaatatatcaatataataagtataaatccttttactgtaaaccatcatgggatatctaatcttagcttgaataaaatattgacgatggtagaaattacatccatgttcctgaaggaaagtgggataaaagaaaacagcgaggttttttgcctgtctcgaacaagcaaatgacgagaattgttcctcatagcccagtcatttaggaggtagagtacctggaagtaaatgctccctgaaatgattatatattaatcttagaattactaaatatatattgttatacaaaattatgtattgtaagtactagtctggcgatagaagagggacccccttaagttcttgtcctatgcctttaaaatagacagcaggagactactccatactaaagaataatttaatgtattaggttttctatgtgcaattcttacagactgcttattgtaacttgaggtgtttctaaagagttcacattttaatattctactggagtcacaataagtttccattatgtcaaagcaaaccatggaggttttctatcctccaaaattacatttgaataaagcaacttccgaagataacagtgtaaaactctgagacagcatcccatgttactttatgagtaaaatcttaggcctgttgacaggaactacaaaagccaattgtgctgcgtagtttaacttatttctgcaaaaactcaaggcatgttattacattttcacacagaatatcaattttcacacctattttggtatcagatgttttcattgtgcaaaacaggaaagcagaactttgggtaaccacagtgaccctactatttaatttccaaccatagagtgcttgtcacaacactgatacacacagtaggctcgtacattaacatacatgtcatattaatgttttctgttttgcttagtagacagatgtaatcattcacttcacacagattttaaaaggttttaatatttttaccattcagttatttagcaattagactgataattcttgaaagacataattctggaatgtgtattagaaaaaaaaacataaaagagaagttactgtatggcagggtgatgattatttaagaggaaatagtactgaattcagaaaaatgttatgacttacagctaatagtaagaaatacagcattataagagcaacaagcttatgagaattcatggccaaaacagaccagaccgtcaatgtgaggcattgaagagtaatataaatgccatgaacaataccctttcaggcatgacaaatacctccctcctctagagtcttcatggttatcaattagcatttcttacactccttggtagtttgaagaagacatgtacaagagacaaaacacaaccaaaataaataataatccttgtctgtatcatggtgtgaaatgtttattaacttggagagagagcctcttaaagctttttgtggagaattcactagatgtaattaatgaaatatcttctatccagacatagttttaaatcagaccttgtggaagcttcatttatctttgatactctgtttccctcttggtaaaatgcacataaatgtaaaatgttcatgaactcttggtaaaatttatatagctcatacatactctaatgatgtaggcatagtgaaatctgtattcagagagaactgtatagccataagatttttaaaagatggaaataaaagaagtatgcatcttaagaaattgtaaaaatagaaacaaaaataaaaattgtattcaacgtagaaaattgaataagaataatccattcaaaagtgagctcttgaaaagattaacaaaataggtaaacctatcccagtcataacaaagaaaacttagaataaaaactagacgagataaatgagaaaagacgcatgacagcagatacagaagaaatgaagtggaaactaaaagcaattttataacaattttgcaaaattctggaaaacttgattttctcgtacaatacaaatcactaaaattgagataagaataagtggaaaattagactgattacttcagaaaacatttagtaggttattaaaggtgtactgttgaagagtgtagtaggattctttacaaatgaatttaacgtaacccttaaagaataatttatatactttaagctattccaaagcatatgaaaagaaaaaaactccacaattccttttgtgatgtcaggttaacctttgtacttaacagtcaaaaagcaaagatcataaatctgtaagacagttttacttttgaatgaaatacaaaattttgttgaattataagaaatataatcacattttgcaagtggtaagcattctacaaatgttatctcttatttaccaagagctcttaaaattcaagaaggaaaagaaaactaccatatagaaattaatgagcaaaacatattaacagacaattcacacatggaattgtaataggtcagtgatacaaaaatatattcaaatgcacaaggaatcatggaaataaaagttaacaaagtgatgtatttgatcatacaaacaaaactaaaagaatcaaaaacaaaacaaaaatttcctggtgagagaagagcctattcttatacattctggttaaaatatgtaattctaaattgtttctaggaaggcaggtggaaacacctactaaaattacatatatatgtgtatatatgtgtgtgtatgtatatatgtatatagatgtatacatatgtatatatgtgtatagatgtatacatatgtatatatgtgtatagatgtatagatatatatgtgtatatgtgtagatacacatatacttgtatagatatgtctatatctccctgaaatgatgcgtatatatatatgtatagatgtatctactagagcagagtgtgtgtgtgtgtgtgtgtgtatacacacactctgatccagtatatacatcctgtgaattgttataataacagtagaagcatcagtatctgaaaatgtatgcataagatattggccaggtgtggtgactgctggtgggaatgttaatcaattctgccattgtggaaagcagtgtggtgattcctcaaagaagttaaaacagaaataccattcaacccagcaacctcattatttggtatatacccaaaggaatataaattgttctacgataaagacacatgcacatatatgtttattgcagcactattcacagtagcaaagatggggaatcaacataaatgtccatcaacagtagactgattaagaaaatatgctacatatacaccatggaatacaacccagacaaaaataagattgtagcaacatggatgcagctggagccgttatccttagcaaactagtgcatgaacagaaaaccaaatatcacatgttctcacttataagtgggagttaggctgggcgcagtggcttatacctgtaacctagtactttgggaggccgaggcgagcgggatcacctgaggtcgggagttcgagaccagcctgaccaacatggagaaaccccgtctctactaaaaatacaaaattagccaggcgtggtggcgcatgcctgtaatcccagctacttgggaggctgaggcaggagaatcgcttgaaactcgggaggcggaggttgtggtgagccgagatcgtgccactgcactccagtctgggcaacaagagcgaaactccacctcaaaaaaaaaaaaaaaaaggggagttaataacaagaacacatggatataaagtggggaacaacagacactggagcctactcaagagtaaaaggtgggaggagggagaggatcagaaaaactacctatcaggcaccatacttattacctgggcgatgaaataatgtgtacattaaacccccatgacacgcaatttacctatgtaacaaacctgcacatgtactcctgaacctaatataaaagttaaaaaagagtagctgtctgccactgaatacaattctgtccctgaatataatatctccaattcccaatcagttaattaccccctagtgatctgaatgctttctggcatgctttctccacctgatacttttcttcattccaatctattttttctttacagatttaatcaatactgagtacatgaatatatcttatgtcttttgcttatcttttcacaatgttacttcctttttcttaccccttgggcttccgtgagacacagttgcctacctaattgtttttcctgtggatatagataaattttattggaaaaaaaccatgaacatttatttaggtattatctgtggctgctgctgtgtgtgtgtgtgtgtggggggggggtgcgatgtgtgttccaatgacttattttttattgtggtaaaatacaaatgatgtaaaatttaccatataactattttttattttttaattagcaaaaaaaattgtatataccatgtagcatatgattttttaaaatatctagatgttgtggaatgcttcaagctaataaacatatacattaacttatatgtttatcatttggggttgaggacacttaaaatctattctcttagcaattttcaaaatacaatattgttattaaccaaagtcagcatgttgtacagtagatctcttgaatttattcctattaaatgtaatttagtatcatttgaccaacatctgcctaaccctcctcctccaagctctatcccctgctaaccaacattttactctcaattctatgagctcaacattttaaaatttcatatacaagtgacatgatgtaatgtttgtctttctgtgcctggcttatgtcatttgacgtaacgtactctagattcattaatttcattgcaaatgagaggattctctgctttttaagtccgagtagtattccagtgtgtgtgtgtgtaggtctgtatacctgcattttctttattctttcatctactgatggacacttaagttgatttcctatcttcgctattttgagtagcactacaatatacattgaagtgcagttatttctttgacatattgatttgtttcctttggaatatatacccagcagtagaattcctgaattatatggtagttttatttgtaattttttgagaaacctccatactgtttttcatgactacaataatttacatttccaccaacactgtgcaaagattcctttttctccacatctttgccacaacttaccttttgtctttttgataatagccattctgtgtgatgtaatatttcattgtagttttaatttgcatttctctgatgattagtgatgttcaacattatttcatttatgtgctggccgttggtttgtcttcttttgagaaatgtctattcaggttcattgccctagatagggtttgaggtatcattttttctatttttttagtgtataattcagtggctttaagtatatttctgttgttgggtagtcatcaccgctatccatctctagaatgatttcatcatcccaagttgaattcatactgattaaacgattactctccattttcacctcccctagcctttaataacttccattttttctctatgaatttggctattttaggtacctcatataagtagaatcatacaatatttgtcattttatgtcttgcttatttcacttagcatatgtttccaaggttcatttatgttgtagtttgtatcagaatttcattcctttttaaggctgaaaatattccgttgtatgtacataccacattttgtttatccatttatctgtagatggacatttgggtgttctcacattttggctattgtgaataatgttactatgataattggtctaccaatatcttaatctctgtttttaattattttggttataaacatagaggtagaattgctagagcctaatggtagatacttttttattatgtgaccttctgttgtgaactttttgacactgggggggtagtaccttactttcctttatcaggtctgagcccagtacctgaatatagtggaaattggaccttatgagaccttttatgaggacaaggaaatggaggaactatcttcctgcttacacagtgacaagtcttatgacagtggataaggggttactggaatctaagttcctattacttgatctaagtctccccagagtcaggtccatggcaacccaaaacgtatctaccagcagtgcttcccgcagtatgagtgagtatgtttcctaaaaatagcatattctctgcttaactgcttgagtctttagtgctatatcatctgattgtcactatcactagaattaagtttcatgaaagcagaaggtttttacttttacatgctcttattacttcattgcctggcagatagccaaaaggtacttgttgagttagtgaatcaatgaatcaatagataaattcatagtggcttttccttatggaggaatttctctcctctactgccatatgaggaatccccagatgatgatgcagatgatgatgctttcttattcttgaatgatcaatctccccttcgatgtagtaacatcttataaaactaaaatacgatatcatgaccaagatgtcaacattcataaaaccaccaatagtattcagattttcccagctttactcatatttatgtgtatgtgtgcatgcatatgtgtgtatttagttctatgcaacattattacgtgtgtaggtttgtaaatccaccatcagagtcaatatgcagaacagttccaccattacaagggtccctcatattgcccttttataagaacattcagctaccccacatcttactcccattcctgacctctgccaactgctattctgttctctatttctgtaactttgtcttttcaagactctcatagatacggattcatacagtatgctaccctttcagaatgactttttccccacttagcataatgcccatgaaattcatccaatttgctgcatgtatcaatagtttgttcttttcattgatgagtgttattccatggtgtggctgtactatggtttgtttatctacccctgagggcatctgggttcccagtttggggctattacaaataaacgtagtatgaacacttaggtgcaggtttttgtgtacacatgtgttttcatttccttgagataaatgctcaagagcccaattaccagattgtataataagtacatgttcagttttgtgagaaactgccagactgttttccaaagtggctatatcatttgagtttccactagcaggggttgagtcatccagtttctccacaccctcaccagcattttatggcactattttttaattttaaccattatgataaatgtgcagtgatacattattgtggttacaatttgcattcctctattggctaaaaacattgaacatcttttcatatgcttgcttttcagatgcttgtgtttaactttactccaccttaaacatttgaggagtgtgaaggacaggagacacagagatttgccttgattaaggcaaataaaaccctgccagattttcatttccaaacacagtcctagacagagataagagagctggcagtttgctccattgtttattagagacctaacattcattctaaaacagaggcgttttactaaaatgcagtcagccttaattataatggcactccttggagctaggtggaagtactggtgaatttttctgagttgtaattccatactagaaagcatatcttaattttaaacatactttatgacattttatttggagatactccagttgacctctttaatctgcagtaatctattcatgtgctgaaagtaaatatatttggggtgcttgtttgttatggaaagtgattttacacatgcattttgtttaatttttagattattttcaaaaagcttcaatgctaagtctctgaaaatagctaaatgcaattaccttcacgtttttattattattattattgcaactaggcatttggtctcttaccttcaaatgttttacccctttctttaacaggttgatttagtgaatattggaagtactgacatcgtagatggaaatcataaactgactcttggtttgatttggaatataatcctccactggcaggtaagaatcctgatgaatggtttccttttgggtaacattaatcttgttttttaatttttacccttgacgtgtgaaacaaatgtgtatttctaacaataacaaaccctgctccatagtgctgctttttaaattgacactaccatgtcgtctgaaatgttaaggatcatcacggtataaaataggttctggtacatttacaggaatatttttcaaaattttatttcattgagtaagtataaggtaaaaatacaaagtcccaatcataggtgagtaatttttttcacaaatgtatgttctataacttgtctataagttaatttagtatgttttattttaatcactaccaaaggaatgaggctttctcagtcttgggtattcttaacataaattattgccaataaaagattagtagaatatgggtatctctatcaataaatgtgtgtaatacatacaaactccataatgtgatttggaaattatttttaagtcacctgagcatagggtcttccgactgtctatttgacctctgcaaaatgggttgaaggatttgtggaaaagatacagacacacacccgtgtgtgtgtgtgtgtagtatatatgcgtatatatataatgtgtctatatatacacacatatatacaatatgcatgtgtgtatatacacacactcatatccacacattatatatgtatatatatacacactcatatccacacattatatatgtatatataagaccaacatgaacttatatccactaatattatccactcattgtatacatatacataatagtataatcataatatgtatacataatcatacatgaacttatatccactaatattttccactcattgtatatatatacgtaatagtaactcgttatacacatatgtataaatatgtatgtgtatatatatataccaacatgaacttgaatttaaacttccacggttaccatcttagtggcatttggtatattgccacccctgttctgggccatggtcccttcactatcaaaagagtaaaaataaaaataaatgtgtatgtatttcttatcacgattaagtgggagaatatctgcaaggcactcagtgtagtataccacttttatttgaggtgtatcatatgacttgtattgattgcttaaagttttccactcatttaaaaaatttggaggctgagaaatgactgctgtttttactggtcgggattacttttttataaatcagcgtttttgaaatgtaattgttagaccatcaatgtactcattctaagtgtaaaattcaatttgcatcaatctggtttagttctggttcttggtagcctctcaaactattttgagggatgaataactcccccccaccacgttcattaaaatttgcaggatatttacagagttatatagccatcatagcgatctaattttggcacttttccaccaccttaaaaagaagtttcttctccatttacagtcatttttcactcccaccccagccctaggcaattgtcaatctatttctgtccatatgtatttgcctttttggatattttatatcaatataatacatgttcttttgtgtctggcttcttgcaatgagggtaatagttcagatccagccctattgtagcagatatcatggcttcattcggtaaacttgaatttttttattttttatttttatttttttttatttttattttgagacagagtcttgctctgtcgcccaggctggagtgcagtggcgcgatctcggctcactgcaagctccgcctcccggattcacgccattctcctgcctcagcctcccgagtagctgggactacaggcgcccccccaccacgcccggctaatttttttttgtatttttagtagagacggggtttcaccgtgttagccaggatggtctcgatctcctgacctcgtgatcctcctgcctcggcctcccaaagtgctgggattgcaggcatgagccactgcgcccggcttgaattttaacttgaattgtagattgctcttgctcagagtcaaatagtgagtagacacaaagagtacctattaaattcagcagccatgttgctctcctaattggcccccatatatttttattccaaattctctgaacaggcttaatgctacttcacaacagtaagcggggagaggggaagagaaagagcgggaattaatatgtgctggcaacaaagaatagctcataggagccttaagtgagcccaagttggccgattttcagcccgttccatatagtgatggtgtcaaatagaaccagcaagcaacataccgcatctctccccaaactgcttttcatatgttgctcagtacttctcaaaatatcttgaggaaggaacacttttcccctaatccattgtatgtaagatagaataaaaccaaagcgttacaaaaataagatgcccaacacccatgcttcctcctttattattaaatacattagacataaatggtactctgtaaaatcgctacataagtttcttgatgcactctgaattgttgactttatcttatggcatagtaacaaataattcctagagtgaatccagtttgcagatcccgctttgcgtaagacagatgtaagttttgacaaagccagcagaagaactcaagcatgcacagagctccaaaaggcactctgaactgtatttattgtttatactacttcttatatgatcttaccatttttaaaaatatcctgaagccctttccaactccatctgaactagtccaagataagctttcaagactattatgtctgataatttcttcacttgcttgcaagttgttcatttattattatttttttattttttatttttgagacagagtctcgctctgtcacccaggctggagtgcagtggcgcgatctctgctcactgcaagctccgcctcctgggttcatgccattctcttgcctcagcctcccaagtagctgggactacaggcgcccgccaccacgcccggctaattttttgtattttgttcagtagagatggggtttcaccgtgttagccaggatggtctcgatctcctgaccttgtgatccgcccgtctcggcctcccaaagtgtttggattacaggcgtgagccaccgcacccagcccatttttcattattagcatgtggaggcgcttttgcaatgaggaatatcagaaggaatgctttttaaatctttctttgtctgagacctctcttatagcctgttgtttttcatttatgcccttgaatcaccatatccttgagactgcaagactgtagactcttcccagcctctgcttacttatctcatctctcttatatcacactgccctgttctaaaactattaagcacactttgaaaaattatcttgctcagtgttcatcataatccagtgaatctaaaaatgtgtttttcttttttttttttttttttacaccaacattacatattttcttcctattaaatggtagaagcccttgaatttcagcaaagattaaaggacattttggtcaacttaatgtacattctagatctatcagataacgagcggcatttacagatagaaccatgttggcccctttttctaatgcaacatactatgttattaatagtgccatggaggacttctcattgaacttgtgaaaactcaggaatgcaaactctgttttcctattactgtttttctactgtccatctcaaataaaattgctagcctaaaacagtaacgcatattttgtaacataggcaggtttgaacaaaattgcaaagcatataacatgtgtttggcatctttttcttccttcttaagtgcaattctttttttttcggagtgctaaacttggctctggcaaccagctggttgtaataacaaatcttgctaacagtggtgagctatcagaagtcaggtccatacttttactggacaattcaagggatgtacttaatggcaacgctaattcactttagaatgttcatattattgatacaatttgcaattacaggagaatgatgacgttcgcactgctgaaagccatccctgtaaattcctgcctaccaagtcacttctgtgcaagacagttcttgctctgctcttctgcagagcttcacagaaactatccttaccatataagattattcctaccctcttcatttctattcctctgctgcaacttcttttaatcacagtctgggttctggggagtagacttcggagttgagtttggcaggcagcatgtttattaagccatgccctggaaaaaaaaaaaaaaaaaaaaacacctgtagaagggcagaggtgacaggagtggaaagaggaagaactagagctgtgacgtagaccctatgacacgcttattcaaaccccatagacaacttgcagctaggatgacccctcagagttgtctcaaatggggttaaaatggctgagtgtttatactctgccccttcatcagtcaatagtagtgggttgccctagagagggtgtgacattggctggcaggactctgcaactcaggtggtacctgagagaactaacaactagaagctgcctgaccacagctggagcaacaagcccttccttgaaggtcaatcttggtggtgcacctccatgtccatcatgccttcttggcccagttaactcctagtcatttttaaaaatcactgctcaaagacatttcaacttttttccttttaaaaattgatttatagttgtatgcgcgcacacacacaaatacatctgtttaaattgagcctcctttagagacagtgagacctgaggacgggacagttttctgtttacaggctcacctttggggaccagctcaatgattttttgataactgccttttatgtaggaaaaggagacatgattatcatacattgccctttattatttttttttgtctgagcaacatttgcacctaagtagaagcaataacagcgaggctgaggctgataagctgaattagtgacataatgatgctataaaggagttttggattgaatactttgttgtcctttaacgttatgcacatagagggcagactggccaagcatttcacaaatgaatcacattcatcattggaggattgcttgattattgcaaatccattaccaccattaagccactatctgctgattccaaccgtaatttagcacaggacacaaaatacacctcctgcagtcactgtacataaaggttgagcaatttataattttagaatatgagacaaattacgtaattatttgacctgtattcactgagtaactgactaaataagtaggtcaagaaggaattaggaaaacttggataatccactcctaaataataggcttagttatcaagggattgtgacagatacatgcaaagatttcatatctccgaatcgttactgtgtttacaaagcatcatctcaaatcttttaaaagtatgttaaaatgagatttagtagtatatcctaaaatttgcatttactttttaataaaaagatgactaacattggagatgttaaaatatgcatttaccccaaaggcatttgttaacttctatatggatgaaaaaataaaattgtcatatttagaatgcacaataaatattcatcatctgatcaaatgttgatagtatatgaaccttaaccttcccagaaggaaagtgcttagtggtacagactgatcacttttacatagatgtcttcttccagcatctcataaggggcttatatttaaaaagcagtctttaataaataataattctttaataaaagatgtagacagttttttctatgaagcgtcactgcattcatgaaacttagaaaaaatgcttagaatggatttctgcatcagatgactcagaagaattaaacttgataatctgttgaataacatctgcacatgcacgaagcctatgagacaatcaaatacatggaaaccaagtaatgaaaatagaaccaaggctacatatgtacacctcttagggataaatatttccttcctttgttgttttttttctttattttaggtaggcaaacatttctgtcttcttttcagttcagccaataaatatagcttgcgttaaatgatggtatgaaatcaggggttttatctgaccatattttgtactttgatcttacactaaccttgcatgtaagatacacagaaatgaggcctagaagaggttaagcaacttgtccaattaccacaattaatagcaaaggcaaaatttgaacatatactttaaaaaacaattatctatagtattcctcctatccaaaaagcgcttttatatcttaagtccttggttaacaataagtctaatgttttatacactgtcttctctagcttgttcattgaaagctagaaggtgagcaattctataaacagtaaatgttgggtctaatatggcagaatccaggagtaatagtgaacacattcagtaaatggtatggcatagataccaatgaatcagaatagactcctagcctttgagaatagacttaacttctggtagaatctattatgtctcattactaattggccctaaaatttctatttatcactgaagatcaaggacattcatatttaagtttgcatggttcttgctcaaggaatgcattttcttatgaaaatttatttccacatgtaggtcaaaaatgtaatgaaaaatatcatggctggattgcaacaaaccaacagtgaaaagattctcctgagctgggtccgacaatcaactcgtaattatccacaggttaatgtaatcaacttcaccaccagctggtctgatggcctggctttgaatgctctcatccatagtcataggtaagaagattactgagacattaaataacttgtaaaagtggtgatttagactctgatgacatatttttccccagtatggttccagatcatgtcctactttacaacatgttatgtacattgaccacattgatctaacgttccattggaatgaactaattaagaatattttccagtgttctatgggatacatataattcagttgttgaaacattaacattagcggagcgtgaaagtggttatagtggagggggagagtatcaatatgtttgacactgggaatcccagtaaatccaggttgtattctaactttgccgagaatggtgttggtctttttatacagataatgtgtttgtataagcctaaactatacaggtaaaaatgatactagatctcatgtgagtagttgtagttaaattaattaccatcatcagatacgtagtgtggagaaagaaacatctgtcttatcagatacacactttgatatcaaacaccataaagccctgtatactttgttctagttcagggtcataagatgctcagagcatttttagtaaccaagacaaagagcagaacacaattaattatatgacacaatgttttgaataccaacagaaacaattgcactggaacagcaaatcaattgctataaagcaagagagagatcttttgtggattttaataaaaagaattcactgtaatacagtgaaccaaagtccttaactatattccattcaacattatatttcttaagatgaaaaagattttttttgcttttcttgtgtaaagttcagtaaatgaattaataacagttcaagaaaaagcaaagcagtgtaggaaatacatatgtatatgtacacatacacttagagatacaatatatactatatgccatatatactacaccatttatactctatatatgtatatatatgtgtgtgtgtgtgtgtatatatatatatatatatatatatatgcttgtgtgtgtgtatttgagagagagggactacagtcactttattttggtcttcctgttacccgtttcatttacccaacccagggctaaatgcattgcctaattaactgtttaaaatgtcactggactgcatcttgcctaattttcagtgcaagttatgttttctcactttgatttttttttttttttgaccactctaccattttcctatgccaatcctgcttctagaaaagctaagaatattaattttctctaaggtaaagctcagtccaagagcaaacacatttcaaataagcatctttgtcaggtgtcttgctccagctggatttaattaaccccatcccgactgggtttccaggtgaattactcagcaacctgatttagaacagaggcagacatgcattcaaatgtcacgttaagcagcgttaacacattgtttctcgtatgacagaagaaaatgtttccacagcctcaatacagttagatgagaagggatagagacattctgtctgtgttttaagtcaatgctcatttatgcagccacatgcttaacactaagggcccgaaaatattgattttgctgttcatgtacacatttgcagatgaataaaaatatcaaggatcaggttatgtggtccttgttggctctctaacgtttttcccttcaagtggaagacttcaatcctgcaagcatgttcccactctatatttgttaatattctatttaatgatttctgaatacatttgtaggtaatacagtaaacatacccaaattgccctgttttatctgtccctgacccactctttctctgtcaaaatatcctcatttatatactctctcctgtcatattggatgaatcatcagtaactctctttatgtattacatggttacttttcaagaggttcttcacagttgtttaatgttctttcatgaatcatctcccccttctttttgtatttggcagatgttcatattctttatctaaagaaaaaaatggttgaactctctgttccatagcgattgtcgttggcacaattaggaatgtcatgaggtgccctcatttcaataattgagtggttcaactatacagaacaaagacatgtagttaatatagagcataaggattgactaagtgtcatggcagttaaaagttgtgtgataaaacgcaaagtccactacaatacccttcaaaggaagccagatttctactttttgtgttaaaacccaatgataattgcttagaaatatgtacaaaagatgcagataaaattacaataactataaagttacaattgtcttcctaaatccttattttagtgtattaccacagcaaattagaagcaaatgaacactagaatcaggagcaaagggaaaacagaaacacaatgtgtcttcatgaccccaatcttaacttaccttatttcaattcttagatgcagtcactgtcagctacttgtactttggttcctgctggttataataatatgtgtgataatgtttctacttgttgacaaactaatttctaacagtataggtatttactccatagtatgaaaaccagccatattatgtttcatccccaggtatttcctaattttattacttataatcattttatagttgtaatttttgcttttattacattaaatggtatgagtatacctcattttaaatttttaccaagtttagaaaggaacttttgaccaatatgaaaaacgagaaaatcatcacacattcttactctcgcctcttctccacctcccatttcggattacattctgtttgcatcagtagtatttgtaacatttatatcagttctgtaaagataggtgtttttggcttgagtctgtaaattgaaaatacatcactcttcttatataaatgtaattaacattacagcaaaataatagaaacgaatgtttttaaacaattattattttgtagacaccgttctaggtaaaatattcaatcaagttccatgacgtagatgctgtcattttacccatctcacaaatagataaattgagtcatagagaggttacgtaatttacctaaaactgtttggctaacatgtggtagagctaggatttaaatttacactatcctaatcatggtgttgatttaattaaaaatctggtgatccttggttgcaagtcaataaattatggtccaggttaacattaaatgctgtgtgggtttccttcatagttggttagttttacaatttttatgcatttgaaagtcatagatatttaaaatgttaattaattttaatagtataaaagaattcaattcatttttaatgctagacgtgacctcaaaggccttttggttcaatgctttttgaatgagaatgccaaagctcaaataaattatatgacttagataagatatccacacactcagttggttagttagtggccaaggaaatggggaaggtaagacaagggaatacagcacgaatgcataagcaatgctcttttttctcatcatactcaatttaaccttgtatactatgccatagatgagaaaactagtttctcatatgttcccacctatgtcctttttttactcccattgcctacagaaaaaaatgaagataaggcagagtgcgcatagtgaacttaaaagtcccctaaatattctacaatttttaaatttttttatatatttttcataacaaaggcattatccaatttgtaaataagctagtttccataagcttgttagctgttaggggtattggaaaatatggagggattcgatttcctaataattgtaaaaattctggtgtattaactagagtagaagcaattaagaagaaaccaataaacctatacctttatttatgtatttttttgagacggagtctcgctctgttgcacaggctagagcgcagtgggccaaccttggctcactgcaacctccacttcccaggttcaagcgattctactgcctcagcctcctgagtagctgggactataggcacgagccaccatgccctgctaatttttgtatttttagtagtgtcggggttttaccatgttgtccaggctggtctcgaaatcctggcctcaggtgattgacccgtctcggcctcccaaagtgctgggagtataggcgggagccactgcgcctggccaattttgaattacagttttagaaaaataacagctaaactacctttgtaactttttttttgtttttttcgttattttgtttttttgtttttgcatagcatgagctcttaaacaggagtccattaatagattcaaatattctaaaactgtatgtagactctgttcacagatatggagagtttttttgtaggagtagaagtttcatagctctcaacagattctcaaaggtgtctgtgattcagaataggtgaagaaccacttgactaatgacttccagtgctgttgggataaattataatacgttaacagccaacaccttatgcaaactcagccagtttctttcttttaaacctatctcccaccacttgatacttagaatcttccaatggagccaggcctgtgaggtcttgattatctgagcatgttttgcttttttccttccctaagaactttaattctctaacgctcacacaacttagaattctattatcaatacattttttttaatgcaagtcgaaacgtctatttaatctgtctttcagcctcagaaaactttcttgaccgcttcagattttacaaaacattttcttattgtctgtgttttttcacatttagagtttaattaattcatatggcttcttcatttttcttgctcattaaatttaaaatccttataagacaagaactgcctcttacactcctttgcattttctctattatcaagtaacatggtatgtaagtttcatgtgctcatccattctctcgtgtagttgataaatatttgttgagcctttattttgtgtcaggctaggtttccagcagtgaacaaaataggcaataaaagattgtacattctagtggaagagaaagatacacagagaaatttaattaaattatataatacgttaaatagtaagtgttaatgagaatagtataaagcagataaggagaaagaaaataagtatatgtgagtttgatttgaggcatgcagttttctttcatttatctatttaggagactggttcttcctcagtcacccaggctggagtgcagtggtacaatcatggctcactatagccacccaggctcaagtgattctccaacctcagcctcctgagtagctgggaccacaggggcatgccagcacacttggctattttttttttttttttttaataagttgtagagaccaggtctcactatgtggttcaggttggtctctaactcctggcctcaagcaaatccttcagcctcagcctcccaaagtgcttggtttacaggtgtgagccaaggtgcctggccagcatgcaattttagatagggcttgggcagggaagaacttatcagtgatgtgattttcgagtaaagacccaatggaagtaaaggagtgagccatgtttatgtcttcgaaaagcgaattccaaatccaagtgcaggaaactatggatcctgtttatggaatatgaggaaagagacaagaaataaaatcagagagttaatagggacctggaccctgttggacttcgtagatcacatgaaatacgtaatttgtacttcccctaaagcagagatttgagaagacggatatgatgaaacatgttaacagatcactctggcaactctgctatgcactaattaacgcaggcaagagtgagagaagagttatgaggctattgtgataattcatgcaagataaaatggattttggactagagtgatggcagtgaggatagtcagaagcagtcaaattctgaatacattttgaattaaatgttgtgtgagagtaaaatagtcattaaggatgactccaagggtttttatctgagcaactgcaattttaaacacattgttcattattgaggaagggagaacagcaagaaaagtaggtaggtttgggggagtatgatgaggataaacatcagaagctcagttcaggacacttgaagcttgtgattactaaatggagataatgagtgtttagaagaatctataatttgaagtttagggaagaggtctgggttagacatataaaactgggcattaccagtaaatggctggtattgaaatccacgagactggatgagatagataaatttttgttgcttggataagctagcgtagattatttgtcatcttcaggattttcttttttccccacatctttattgctgtataattgacaaataaacgttgtatgtatttaaggtatacatcctcagcattcttttttgatacagggtctcactctgttgcccaggctagagtacagtggcacgattatggttcactgaaccctcaacctccctgggctcaggtgatcctcccacctcagccttctgagtagttggaactgtaggcatgtgacaccacacccagctagtttttctttctttctttctttctttctttttttttttttttttttttttttttggtagaaacaaggtttcaccaaattgtctaggctggtcttgaacttctgggctcaaaggatctgcccacctccgtctcccaaattgttgagattacaggcatgagccaccacacccaatgagatcttccattaaaattattacttgtttaaatagaaatattttaaagggtaaatgaattacactcaagacttaaggactatgggcattggttgtcaatgaaaattaagcatggaagtaaatctcatggaacattctagattgatttatatttgtctttgtgtatgtgtgtatgtgtatgtgttttaggccagacctatttgactggaatagtgtggtttgccagcagtcagccacacaacgactggaacatgcattcaacatcgccagatatcaattaggcatagagaaactactcgatcctgaaggttggtaaatttctggactaccactgcttttagtatggtagagtttaatgttttcatctgagacttgtcatttctacacaaaatacaaaactacatatcttaagttttccaatactgtagatatatttaaaatgttcagccttcttgcactatattatgaattgtcttatttaattctagttctcaaaataccagtatctaaaattgcagtgaagacttttaggaaaaaagcctttaaaatgtgtatgccctatggatggagcatactgcatttggagtgcattgactccaaataattataaaaagttaatgttttgcttatgctaccaagagatttgatagagtaatcagctataattaattagctactcttgccaatttcattcatatactctataaaaggcaacatggtttactatttaaatcaggaaatctattcctgccactacttctgttgtaatttttcactctggggagatcctctgttggatggttactcattttctgcttctttagttgataggcagaagtgtatttatatttttattacattacacttcaataactttgactcttatctctggtgctacatagtcataccttccagacgtagagattacagagataataacactgtgacctctactcttcttctagcctatgaagtacactttttgccatgccaattttgaaatggtagcctctgttctcaattctcaaggctttactacactctaaaatcaggagttggaaaagtgaaatcggtgggattgaagatgatatttgggtagaagctgttctacaatagaagctgataattaaatgcttttgggaatattaaatcgatttcatcaattccaaaacaggagatctttcaatatggatggtaggtcccatcaagaaaactcaaaaatgacccagaagacagccttttgccagtgaatttattatcaaccagaatctagtactcagttttgcagacgcagaagcctgattgcctcagatcatctagcagatccacattggggtgggaggagttaactttaagtttaaaaagtgatatataaataaaaatggaaattcagtaatcttaaatgagatataacaagcagcagaatattcacatacaattgacaaatatattgctcttgataagcacatgtacttgggaaagcaaattacaacaaaaatgttagtttgtgaagttgggatcagattaagttgacttgaaatgtttcttctcctttggataatgcatggctgaacactgaatactgtaacccctttttattgcttctatacacgatagtatccctcctacccctgtttttagctctaagggagaaactattaatcctacgtccttagtttgcagtataggggaggattactttactattgactcgtagtacacatttgtatgttttctcttagttcagtgaggtagaaagggcagacataatgaaaatacggacttcaacctctgaggataaagagctatactgtatgaatttgaaagataaggctgttaatatgtttgttttttattgaatcacatatggtcagttcccattattggggtgtatgctctagttattcttgtgtgtgtcctatcctttcataaaacagtaagagaagatttaaaaatagatatttttcttattaagtgacaaaatggcttttgacctctagtgctcctttgaacttacagaataggagtgcctaaatgggcatccacatcataatcagaaaataggtaaatatatacacctatgtatatatccacaaaaaatttaaatgaataaaaacaattttaaaaagtaggttgacgagcctgtaatcagaaaaaggcaggtacatgaatagtgtattttatagctaaaagagcctggtatacctaactccatatgctctcctaagtgggaagtatatgtagaaaggtacattgtatatcctataagatcaccattttactgtctcaaacttcaacaatttaaaatcaacaaaatgtaatatgaaatacaggctgattaatgaagatccagccactgcttatggtctcgttttcccaataaaatctcatatctgtaaagcctttctatatatagactcttccaattgaaagagcatcttatcgcttaaacaggtttcctgtttatttgcgtagaggtgtttgtagtattctctgatggtagtttgtatttctgtgggatcagtggtgatatcccctttatcattttttattgtgtctatttgattcttctctatttttctttattagtctatctagcagtctattttgttaatctcttcaaaaaaaaacacctcctggatttgttgatgtttttttttttttttttttttttttttaaatgtttccgtctccttcagttctgctctgatcttagttatttcttgtcttctgctagcttttgatttgcttgctctggcttctctagttctttcagttgtgatgttagggtgttgattttagatctttcccgctttctcctgtgggcatttagtgctgtaaatttccctctcaacactgctttagctgtgtcccagagattctggcacattgtatctttgttctcattggtttcaaagaacttctttatttctgtcagaattctgttatttacccagtagttattcagaagcagattgttagtttccatgtagttgtatggttttgagtgagtttcttaatcctgagttctaatttgtttgcactgtggtctgagaggttggttgttatgattttcattcttttgcatttgctgaggagtgttttacttctaattatgtgatcaattttagaataagtatgatgtggtgctgagaagaatgtatattctgttgatttggggtggagagttctgtagatgtctgtgaggtccacttggtccagagctgagttcaagtactgaacatccttgttaattttctgtctcgttgatctaatgttggcagtggggtgttaaagtctcccactattattgtttgggagtctgtctctatgtaggtctctaagaacttgctttatgaatctgggtgctcctgtattgggtgcatatatatttaggatagttaggacttcttattgcattgatccctttaccattatgtaatgcccttctttgtctttttttgttttttttaaatctttgttagtttaaagtctattttatcagagaatagaattgcaacccctgcttttattttttttgctttccatttgcttggtaaatattcctctatccttttattttgagcctatgtgtgtctttgcacgtgagattgctctcctgactacagcacaccatttggtcttgactcttcatccaatttgccagtctgtgtcttttaattggggcatttagcccatttacatttaaggttaatattgttatgtgtaaatttgatcctgtcattatgatgctagctggttattttgcttgttagttgatgcagtttcttcatggtgtcgatggtgtttacaatttggtatgcttctgcagtggctggtactggtttgtccttgccatatttagtgcttcctgaaggagctcttgtaagacaggcctggtggtgacaaaatctctcagcatttgctcgtctttaaagcattctatttctccttcgcttatgaagcttagtttgactggctatgaaattctgagttaaaaattattttaagaatgttgaatattggcccctactctcttctggcttgtagggtttctgcagaaagatctgctgttagtctgatgggcttccctttgtgggtaagccgacctttctctttgactgtcctgaacattttttccttcatttcaaccttggtgaatctgacaattatgtgtcttggggttgctctttttgaggagtatttttgtggatgttctctgtatttcctaaatttgaatggtgggctgtcttgctagtttgggaaagttcgccgggataatatcctgaagaatgttttcccaggtatactaatcaaacttaggttttgtcttttcacatagtcccatatttcgtggaggctttgttcattccttttcattcttttttctctaatcttgtcttcacactttatttcattaagttgatcttcaatctctgatatcttttcttctgctggatcgattgagctattgatacttgtgtatgcttcatgaagttgttgtgctgtgtttttcagttccatcaggtcatttattgttttgcctaaactggttattgtagttagcaactcctctaaccttttttcaaggttcttagcttccttccattgggttagaacatgctcctttagcttggaggagtttattacccaccttctgaagcctacttatgtcaattcgtcatactcattctccatccagttttgttctcttgtttggtgaggagttgtgatcctttggaggagaagaggtgttctgggttttggaattttcaccctttttgtgctggtttttcctcatctttgtggatttatctacctttgatctttgacattggtgaccttcagatggggtttctgagtggatgtcctttttgttgatgctattcctttctgttttagttttccttcaaacaggcccctctgctgcaggtttgctggagtttactggaggtccactctagaccctatttgcctgggtatcaccagcagagactgcagaacagcaaagattgctgcctgttccatcctctggaagcttcgtcccagaggggcacccaccagttgccagccagagctctcctgtatgatgtgtctgtcgacccctgctgggaggcatctcctaggcaggaggcacgggggtcagggccccacttgagaaggcaatctgtcccttagcagagctccagtgctgtgctgggagatctgctgctctcttcagagccggcaggcaagaacgtttagtctgctgatgctgcacccacagctgccccttccctcacgtgctctgtctcagggagatgggagttttatctgtaagccgctgactggggctgctgcctttctttcagagatgccctgcccagagaggaagaatctagagaggcagtctggctacagtggctttgctgagctacagtgggctctgcccagtttgaacttcccagcgactttgtttacactgtgagggaaaaccgcctactcaagcctcagtaatggcggacgcccctccctccaccaagctggagcctcaggtccacttcagactgctgtgctggcagcgagaattacaagccagtggatctcagcttgctgggctccgtgggcgttggatctgctgaacttgaccacttggctccctggtttcagccccctttccaggggagtgaacggttctgtctcgctggcgttccaggcaccactgggtattagactcccacacaataatagtgggagacttgaacacaccccactgtcaatattagacagatcaacgagacagaaaattaaaaaggatattcagtacttgagctcagctctggaccaagcagacctaatagacatctacagaactctccaccccaaatcaacagaatatacattcttctcagcaccacattgcacttattctaaaattgacgacataattggaagtaaaatactcctcagcaaatgcaaaagaatgaaaatcataacagcctctcagatcacagtgcaatctaattagaatgcgggattaagaaactcaaaagtgcacaactacatggaagctgaacaaacctgctcctgggtgactactgggtaaataatgaaattaaggcagaaataaataagttctttgaaaccaatgagaacaaacacacaatgtagcagaatctgtgggacacagctaaagaagtgtttagaagagggaaatttatagcactaaatgcccacaggagaaagtgggaaagatctataatcgacatcctaacatcacaattaaatgaactagagcagcaagagcaaacaaattcaaaagctatcagaagacaaataactaagagcagaactgaaggagatagagacacgaaaaacccttaaaaaaaaaaaactcaattcaggagctgtttttttgaaaagattaacaaaatagatggctagccagactaaaaaagaagaaaagagagaagaatcaaatagacacagtaaaaaatgataaaggggatatcaccactgatcccacagaaatacaaactaccatcagagaatactataaacatctccacgcaaataaactagaaaatctagaagaaatggaaaaattcctgtacatatacactcttccaagattaaaccaggaagaagtcaaatccctgaatagaacaataacaagttctgaaattgaggcagtaattaatagcctacaaaccaaaaaaagcccaggaccagacagattcacagccgaattctaccagaggtacaaagaggagctagtaccattccttctgaaactattccaaacaatagaaaaataaggactcctccctaactcattttatgaggccaacatcatcctgataccaaaacctggcagagacacaataaaaaaaatttcaggtcaatatccctgatgaacatcaatgtgaaaggctcaataaaatactggcaaaccgaatccagcagcacatcaaaaaggttatccaccatgatcaagttggcttcatccctgggatgcaagattagtttaacatacagaaaccaacaaacgtaatccatcacataaacagaaccaatgacaaaaaccacatgattatctcaatagatgcagaaaaggcctttgataaaattcactacccttcatgctaaaaattttcaataaactaggtattgatggaatgtgtctcaaaataagagctatttatgacatacccacagccaatatcatactgaatgggcaaaagctggaagcactccctttaaaaactggcacaagacaaaaattccctctctcatcactcctattcaacatagtattggaagttctggccagcacaatcaggcaggagaaagaaagggtattcaaattctctgtttgcagatgacatgattgtatatttagaaaaccccatcatctcagccgaaaatctccttaagctgataggcagtgtcaacaaagtctcaggatacaaaatcgatgtggaaaaataacaagcattcctatacaccgataataaacagccaaatcatgagtgaactcccatttacaattgctacaaggagaatagaattcctagcaatccaacttataagggatgtgaaggacctcttcaaggagaactacaaaccactgctcaaggaagtaagagaggacgcaaacaaatgaaaaaacattccatgcttatggataggaagaatcaatatcatgaaaatggccatactgcccgaagtaatttatagattcaatgttacctcattaagctacaattcactttcttcacagaattagaaaaaaactactttaaatttcatgtggaactaaaaaagagcctgcattgccaaaaccatcctaagcaaaaataacaaagctggaggcatcatgctaccttacttgaaactacactacaaggctacagtaaccaaaacagcatgatactggtaccagaacagatacatagacgaatggaacagaacagaggcctcagaaataacaccacacatctacaaccatctgatctttgacaaacctgccaaaaacaagcaatggggaaagcattccctatttaataaatgatgatgggaaaactggctagccatatgcagaagactgaaactggaccccttccttaccccttatacaaaaattaactcaagatggattaaagacttaaatgtaatacctaaaaccataaaaaccctagaagaaaacctaggcaatacctttcaggacataggcatgggcaaagacttcatgactgaaacaccaaaagcaatggcaagaaaagccaaaattgacaaatgagatcttactaaatagctcctgcacagcaaaagaaaactatcatcagagtgaacaggcagcctataggatgggagaaaatttttgcaatctatctatctgacaaagggctaatatccagaatctacaagaaacaaatttacaggaaaataaccccatcaaaaagtaggcaaagggtatgaacagacccttctcaaagaagacatttatgtggccaacaagtatgtgaaaaaaaagttcatcatcactggtcattagagaaatgaaaatcaaaaccacaatgagataccatctcatgctagttagaatggtgatcatcaaaaagtcaggaaacaacagatgctggagagaatatggagaaataggaatgattttacactgttgggagtgtaaattagttcaaacattgtggaagacagtgtggtgattgctcaaggatctagagccagaaataccatttgaccaagcaatcccatcactgggtatatacccaaaggattataaattattctgtgcttatttcagcactattcacaatagcaaagacttgaaaccaacccaaatgcccatcaatgatagactggataaagaaaatttggcacatatacaccatggaatactatgcagcaacaaaaaaggatgagtttcatgtcctttgcagggatgtggatgaagctggaaaacatcattctcagcaaactaacataggaacagaaaatcaaactcggcatgttctcactcataaatcggagttgaacaaccagaagacatggatgcagtggagcatcacacactggggccttttggggtgtgtggggctaggggagtgatagcattaggggaaatacctaacatagatgacggattggtacagcaaaccaccatggcatgtgtatacctatgtaacaaacctgcacgttctgcacatgtatcccaaaacttaaagtataataataaaaagtttcttaaagtttacttatggctgcaaataagatgaggattcagcataagtcatatatttttaaaatatgtcaattcttgccattgtgttagggaaaccaccaagtacacatttatacatttttgctcagcatttttcaggagataatctcaatgatgattcaaagaaaaaaataataactcataagaatttttatttactgactgcttagtcacaaaagacagaacaccatctcttgaagtctcagacttagaacactctcttcgatagatttaccagcaaaattcgtgattcatgcctgtatagtaattgcttttgtgatgttcatatttttatttaaccagatattggttctgtagcttatgcatgatgttggctactctccaaagaaatttcattttaaattagttatgccccttaggagaataatgaaacatttggggagaattttattattgggggattgaagctatatttggtttaagaaatacctgccaaataatgctttgacaattttaaacataagctttgttgatagaattgctttataaaattaggaagtcattgaaaccttgtaggatttcatatatagaatttgatatgctttggccttaactggtgttttgaggcctgaggtttagttttaagtggaattgccttttaaaatgagtagcagtaggcattagcataagcgatttcaggagctgtttctagtgtgtttagatgctaacatatgcaaaaataagtacatctagggtaaacttaataaattatgtatgtttatgctcatagataataggtatatctctttaaaaatatccttttgtgaatcagacaattctcttcccgttatgatttctctgtaagacagtacattctacatgcgttggtcgtgggtttcatatacattgtttctctgagtttcaaacagattggtttgtttgccagtccaaaaaaaaaaaaaaaatcctccctatattaagagagtgctttgtcagctttcccctgtgaataacaaagtgaggatgttctctttaaaggaataaaacaaaaaatcagggataaaagattgcgcctgttctagatgtcttttgaatattagtgtagaaagccatttccatttaggatatgaaatatgatatggaaatgttcttacttatttaccagggtaactttagaacaaaaatgaataatgacagtcaaatttgaccaaaaaaggaaggacactaggactcgagagaaatttttgtatcctcaaaatgacatttacaaacccgttagggtttggttttaatcccctttattttgacttcctgagaatggtgacacggattctattttctgcttggctaatccctgcatcactcttgagttgtttttatagccttcttttccaagaattagctctgcctgttggaaagttttactcctggagtgaatgctttcagacttggctttgtatgcatgcaggattttaacctacaaaaataatcatggaaagatacatagaatttgctataaaagagaagaatatttttaaggcctcttatgttgggtttgatatcaattggctgaacaagggctgttttaacttttttccgcctctgctgtaatcatcacattttgataccataatggcaagaaatgtttataagtttacacaggttaaaattgagagggttaattctcaggaggattagagttaatttaaataaataaatatttttgtgaacataaacactaattttatatcatttagattgatttttgtctagaactcattatagagtaccttgttttcagaaaatctaatgcgattgcaatattataggtgttccttctctatatacggtatttcaactagaaatccttactgtaaatatttcagacaatttagagtcaaactctgcagttgaaaatatatttaagaaaatatttaagaaaatatttcactggcacttacatgaatgaaaaatggccattgcctttttgatgacaaagtaatatataccaaataggtatgatacagatgattatattaacattcagatattattgtagcaatttcctcttccctgatgggaaatcttgaaattgctcttcatgacaaaaattaagacgtaaatgttatttcccagtggcctaaaagttagaagaggcatgagagtattccagtgtgttctcttgatgttatgtgttgtacatctttctcagttcagataccataaaaaaactgagtattttctgggcagttggaaccagtcactaataaatgaaagcaatttttgttctccttatccatttcagttgtttggatgacaaataattgcatgtaactgtcccaaattcacctacttagacaacagagacttgaaaaacattaaatatgatatttgtgtgtgcgggagcctggcttgaatttaccctttataacaaattttggtattttctactaatctttcacattcttctatgatttgtcaccattttaactttatggaaaatggtcaatttataatttctatctcccctaggggctgatttgttaaagtatgctttagttaagtaagagtttcttactcagttggggaatttaaataatgaagtataatcatgcgattgaagatgtgcattatggattaggttctatgccaaatttgttcagaaacatttaaatataattcttacctagataactgagaatctcttttcaattagcttaccaggattattttcacaactttttttttttaattacaggtgaaataacaatatccttggcctatacagtgacattaagtgatttttgaatgattgacaagacattaataaattaataatgagaaatgcagccatgaggttctaatgctaaataatatgtaatagacactttgtggatggttttcctagtcatatcatcacaatgagttcatgagactaaagaaatatattaaaaacatctattggtatttgttaattttatttcagctatgaaggaatacatgagatattaggtttgattcagaaaagtgttctatagttgatatctgtgtttcttgtcacagaattttgccttggcaaaaacattttgaccattctaatgatggtaaatgagaataaaatggcataagtagtttaaaattttctatgtggttttaagtcagtgataatatttgaatgtaatgtatattttgctgatagttggaaaacttacttcactgtcttcaaaatggagttaactgtgttttatacataattataagtgatatcacagggctgggtgtgatggctgacacctgtaatcccagcacattgggaggccaaggcaggagaattgctttaggccaggagttcaaggctgcggtgagctatgattgtgccactactctcaagcctaggcaaaagaactgaggccctgtccccccatcccacaaaaacaaacaaaaaaagacatcacagaacctgcaaatgaatatccaaaaaccttaaagctgggcactggaaaaatagatattaggttggtacatatgttttccaattaaataatttctatatataaaatgcatgtgacattttacagctggaacatgaaatataagatgaaaatatactattttacaacaatatttgggtaaaataatgatgaactaaagtctttgttgatgtcatttaaatcttataagagggaaatttaattgtcatacaataggatttattccttgcagagggaaacctgaagatttatagttgtcttgtcattttattttaaagcaataagctatcctcttagatttattctctttttagaacttttatttttattgatgcataacgttttacatatatgtacatacatgtgatattttgttaaacgcactgaatgtgtaatggtcaagtcagtgtatttggggtattcattactttgagtatttatcatttttatgttctgtgaacattttgagttctctcatctactttgaaatgtacatcatattgttgctaactctagtcacccctttctgctgttgaacattagaatatataccttccaactatatatttgtacccattaaataacccctttttatattcccttcctacccttcctagcctctggtatcttattatactctctatttccatgagaacaactttttttacacctatatatgagtaagaaaatgtaaaatctatttatctttgcctcgattgtctcacttaataacctgcagtttcattcatgttggtgcagaaaatgtaattcttttttatggatgaagagtattccactgtatatatgtaccacattttctttatccatttgttcactaatggacacttaagttgctattataaatagtgcctcaataagcatgcaagtacaggtatgccatgcatatacttttcctgatagttagaaaagtatatgattgctttccctttacatatatacttattagtggcattgctgacacatactctatttctatgtttagttttttgagaaatcttctccatactgttttcaatagtggctatactgacttatattctgaactacaacaatgtattaagagttcccttttcgttgcacctcgtcaacatctgttgttttcttgtctttttaataatagccattctaactggggcaagatgatggctcatcatgacttgatttgcatttccctaatgattagtgatgttgagcattttttcatatacccgttggtcatttgtcttcttttgagaaatacttattattgtcctttgtccatttttaatgtgattatttttttactgttaaattgtttgggatcctcgtatttcctagatattagtctcttgtctgaatagtttacaaatcttttctcccattcagcaggttgtctcttcactctgttgaatccttcctttgttttacagaagctctttcattttctacagtcccaattatctatttatgtttttgttgcctgcgcttttgaggtcataaccataaaatctttgcctagaccaaggtcctgtctgttttccctatgtttgcttcatgtagtttcagttttaggtcttacctttaaatccttaatccatcttgagctgaattttctaatatggtgagagacagggatccagtttcatacttctgcatctgacaatccaattctcagcaccatttgaagaaggtgtccttccccctaatgcatgttcttggtgcttttgtcaaaaacaagttgtatgtaaatacatggatttaattctgagttctctaatctattccattgttctatatgtctgtttttattctaacaccttgctgttttgtcaagtagtgtgattcataagtctttgttctttttgctcaggattgctttggctattcaggctctctgctggtctttgatcgtacaaattttatgatcactttttattccatttctgtattctgatagggactgcattattcaatgtagaatgctttgagtagaaagatcatgttaataacattaattcttctgaccgataaacatgggatgactttccatttgttggtgtactcttcaatttgttttgtcagtgttctgtattttatacggacctttccctcctgggctaaacttactcctaggtattatttccagccgttgtaaataggtttgccttcttgatttctttctcagccagttcattattggtatatagaaatgctactgaattgtgtatgttgatttttgtatcctgcaactttactaaatttatttatcagatctgagagctttctggtgagggtttagctttttctagctataagttattaacaaagagcagtacttggacaacgatttcttctattaggacgccttgtatttctttctcttgattgctctggctaggacctccagtactatgttgaatgagtggtgaaagtgggcatccttgtcttgttcttttttttgtttttggttttttgtttttgagatggagtcttgctctgttgcccaggctggagtacagtggcccaatcttggctcattgcaagctcagcctccagggttcatgccgttctcttgcctcagcctcccgagcagctgggaccacaggcatctgccaccatgcccggctaattttttgtatttttagtagagatggggtttcaccgtgttagccaggatgatctcgatctcctgatctattgatccacccacctctgcctcccaaagtgctgggattacaggcgtgagccaccacgcctgaccattccagttttatagggagaaatttttcagcttttccccattcagtttgatactacttgtagatttgtcatatatggtctttattttgttaattttttttgtatgcctagtttgttggagtttttatctcgaagggatgttaaattttatgaaatgttcttttgtgtctattgaaaggatcatgttttctgtttttcattctgtttgatgtaatatgtcatatttattgatttgtgtatgatgtatccttgtatcattgggataaattccacttgataatattacattttttatgttctattggattgctagcattttgtagagaatttctacatcagtgttcatcagggatgttgtcctgtattttttgttgcataattgtctgggtttggcatcagggtaatgctggcttcatagaatgagatagggggaattccttcctcttcaatttttcttggaacacttacaggagaattggtaaagtttggtagaattcagcagtaaagacatctggtcctggactgtcttcgttgggaaattttttaagattactgattcaagatcattactaattatagatctgttcagattttctatttcttcttgatccacggttggttgtatgtgtccgggaatttatacattcctctagatttttagtttattatttaatagttgttcagtatagtctctgaactttttatttctatggtatcagttgtaatgtctccgtcttcatttatgattttgagtcttttttttttcttggttagtctagcaagtgctttattttcatctttttaaaaatcaaacttctcatttcattgatactttgtattttttgctctctattttcttgagttttgctcaatttttaggattttcatccttctactaattctgggtttggtttgtttttttttctttgactagctccttgaagtactttgttagattgtttgaaatatttcaacatttttgatgtgagcatttttgctatatacatcccccttagcactgcttttgccatatcccgtaggtgttattatattttgatattcatttgtttcaataattttttgaaaacatttcctcaattttcttccttgacccaatggtcattcaggagtatgttgttcaatttccatgtttttgtacaggttccaaagtttctctttttgttatttccttgtgttttaagaagatattagatatgattttgattttttataaatttgttaagacatattctgtcataacatatggtctgtcctggagaatgttctgtgtgcttatgagaaaaaaatgtgtatgactgttgaaggaattgtcctataagtgtctgttaggactatttggtctaaggagcagtttcaagccaatgtttctttgttaattttttgtctaagtgatctaatgctgagagtggggtgttgaagtcctcagatattactgtatttgcatctagctctccctttagatctaatacttgctttatatatctgggagctctcgtgttgggtgtatgtatgtttagaatttttatatactcttgctaaacttatccctttatcattatataatgaccttattgtttgtttttactgtttttgactgaaagtctgttttatgtaagcatagctgctgcttctcccctttggcttcggtttgcataaaatatacttttccatccctttacttcaaatctatatgtgtctttacaggtgaaatgagtttattttaggcagaatatttttgggttatatattttttaatccattcagccagtttatgtcttttatgtggaatgtttaatcaatttacattcaacattattactgatatgtgagggcttatttctttcattttattgatttatggttgttttgaatattttttcttcatttttttccctcattatcattatagtgtgatggtattctttagtggtaacatttgagtaacttttcttgattttttttgtgtgtttgcactactagttgtttttatatttttatgtgttttcatgatggtagttgtcattctttcacttccaggtataggactcccttaaacctttcttgtaaggccagtatcatggtgataaatttccacagctttcactcgtctaggaactattttatttctccttgatttatgaaggctaccttggctgggtagagtatccttggctggtggttgttttctttcagcaagtttaatataacatctcattcttctctggcctgtaaggtttcttctgagaaattcactgttaatctgatggaggtttctttataagtgacaaggtgcttttctcttgctgtttttagaattctctttttgtctttggcttttgagagtttggctataatgtgtcatggacaagacatttttgaattgtatccctttttgagatctttcagcatcctgtatctggatgtctaaatctcttgctagacttgggaagatttcatctattattttgttaaatagggtttctaaacctttagtttctcctttaccttctaggacataaaaaatgcaagcatttcatggctttatggtgttgtatatgtcacataggctttgctcatttttttaaaattttttgttattttttgtttgagtaggttattttaaaagacctgttttcatgttctgagattcttctgttttatctagtctcctcttgagtctttgcctttgattctgaatgtatatagtagtatacttcctgtatgatttctttggatgtaaacagtatgaatggtgtctgtaacttcctcagtagcttagggtgcagttgttagcagaagctgtggtgaagttttgccggtgactgggacaccaagtggtccagtcttcaggccccagtggtggcatcagttggttgagcgtgcctgtcctcaggcctcagagctgtgtacattggcattgatgttagtgtgtccaggcaggctaaccctttggcttataggtggcttgcttggttgtcaggaaaagcataggtgggctgggtgggtacacaggttcccagcccaggggcagcaagcatggtgcgggtaatggcaatagtgggaggggggcaaccctctggaatgcaagcaatccatgatggtgttggtggtggatgcaacagattgggcaagccagttcctaggcctgcagatggtgcatgtaggttgacgccagctttggtggtagtggaagcttgagtgggcccaaattcaggccccaggaagactagtcagatgccaatggtggtaaactggggtgggagagccccaggtctctatacaaatttttatgtactgggggatttggaagagcagagctgggaagacctgtcctcaggactcctggtggtgcatgcaaccactggttattgtagtcgaggggcaaggtgctccccaggtcccttgtgcaatgctcaggtggaaggcagtgttggctacactgtggccctgctactggagagggtaaggttgctttccttgggagcagccataagcagttgcctgggtagcctgtgcgtcgcttgtgtctcaactccacagcagttcacagtgacagcatttgcaggcagtggaattagtcttcagtgtgcatgaagttgagtggccacccctctgttgggcaggggagggtttgctgccagtggttcctgccttggccccagcagttgcagccatgggtgggaaatatcactgagactccaggaatgtggagatagggaagatttttagtcctaggtcaggacatagactggtgggggctgggctctcaaaaccaggccatgttgcagctgcttaggactctagagtttgtggaacccagcatgggcttcttccgtgaagcaatgcctttgcacagtatctagacagctgtgtgttggtttgggggcccacacgggttgaagggctctcaattggctaggattgtaggaatcttgtacaagaatgtgtacctttgtgcatctctaattctctccccatgttagggagcctctccagactcctagccaatctcagctggatagagtgcctcatttccttctttttccttttagtggttttcattgcttctctgttgaatttcagtgttttctcttagttaatgtattcaaagtatgattatctacttggtactttggttcctctccatggaagaggtgagtaacagatccatcaattcagccattttgaagccccagattttttgtcttatggcaatcgtgtggagttagtggatcatatgatatccagttgaaaagtgagaaaactgttacaactattaaattattaggaattttatatattattacaatttaataaggtggttgaaaccagtgtttttacttttaggaaatatcctgtaatatcattcttgtgagatgttaatattgctgaataaacttttgcttcaaatcaaagcacatttttcccctgcaaagatttttctaatttatcatcagtgatataaactcaaatttgcaagttccttttggtagaagagtgcaaatgtttaagtagggcagtcatgttctagataatttccatactttatcttatgtcttgtacacaacaattccaggtaagtttatccttcttttataaatggaaaaactgaggcttagagagctttattaaaatcaagatcacacagccaatagataactgagctataatcaaatccagggtttatctcttcttaaagtccgtgttatttctcacaagactgtccaataaaatcggttggggaagctttatggcaacactgggattgaaactagtattttatttcactgaggacgggctgtgacatcagcaatttttagaagctcagtaagtgagagtatcctgcagctaagatagaaacaactacaatggaacaattgtttctgtgagatatgcccttttataggataagatccagaatctgttgtcccagcatttgtttagacttctagcattttcttccttaaaaaatgactaagcctgctgttcacatcttcaattactggagtactgcttattgctaacagttctgttaatgagaaattgttcatccacagacaaagtaaaaatagactagctgtcacataagactggccatcaaaacattctctttaggattaagaaacttgccttatctcctgtctgcacagttgtctctcttcattccttcttctatttattgcttcacggacatgtttgtgatagaatggtactctgactcaaacagtttccagcaagggttgcccaggtgagaggagctgtttgcagaggtgatccctgactctttgttctttaatttatttcttcttttgcctgcctctctcatcttgttactaattgacatcactgtgttctgctatctgaggtttgttgatgccttttgcagccaataaaaatgtctttcattggcagagctgataaagaactagaagaatttttaataataactaagggctaataagggaaaacaattaaaatgatggtaaaataatagttttcaaattagaagtctgatcccataaatccacttgaaataagcaaatggcttaattttatgatctctgatattaatgccataaataggttgaatttatttaccatttatccagggttagttttgctaaacagtttgtattttagccagatatgcaacttttactgacaggacataatgaactttggagcctgcactgttagtgtagttgtaaggagataaaattggcaattatactcacagatggaatagaatttaatctatgacatttacttagctgtacagaaggatacaaggcaggagatacactgtcatagaatctttgtatcattggatggcccagaagcaaccaacatacagatttccacatgcctctcacccaaatgtgctccatatagctgctaggacaacggccaaaatcagtgtggtttacttgacatgaagaaattgcagcattaatttcccaccaatatttaataccattgttgtcacataggacaaaagactatatattgcctctctgccccactccccagttaatttaatagtagtcctacctagcaaacaagagtgacaagaaattctactattatcttaactcttaatcctaagaaaataagtttctatgttcattttcctaggcagcatcagattaacctagggttgatttaactttttctacacagagccaactagttttgggttaaaatctgatttttgcctttattagttttaggccactggaaaattattgaggctcagtattgctcacgtgtaaagtaaaaatatttacctcccactgctacttcaaggagtaagtaaaacctgtatgtatttggcccgtaatatgagcccagaaacagtagctaaagttatgtcaaataactggaatgttgtaaaaattaaatggtccctttatactcctgtagggaaaactgatctttccagttattttgcctgcctctagaataaatgctgactctccccaaattaaatacaggagtcctcccttattcattacagtttctgctacccatggtcaaccgtggtccttaaattgatgagtacagtacaattagatgatggtggggagggtgggcagggagaggtgagagtccacattcacgtaacttttattactgcatattgctataattgttctattagttattaatctttttctgtgcctaatttataagttaaattttatcataggtatgtatatgtatgggaaaaacagtatatatagggcctatttgtggtttcagacatctgctgtaggtcttggaacatatcccccgtggaaaagggggatctactgtcatttcccatttgaaatcttgctggtcttcctgtgaccttcccactcattctggttttctggtctgaggaatactgctggctcacagctggtgtactgggtggtaatctttgatatccttgagctccagagtctaatctagttttcataaaagatttatactatatcttaaattcctcagagtggttctctctctctttctctctctctctctctctctctctcacacacacacacacacacacacacacacacacacttgacagagagattgattcacagttgtcatggatacatggtagatttctagcaagtctcctgaaggctggttcatgatagtaccttataattgtcatagtatttgtaagacattagttagcacacttgcaaaagtataactaggttttctcttgtagtcattacgtcatatgacatcgtaaaagtggttgaattggttcccagactctcagaaaaactcaacttctgaagctgggagtaatacatacatagtaatattgatgtaatctggtgtgatatttattaaacattaagtgctgggcacattgcttgatattgtataatttcgttttatttctgcaaaaactctaggaggtagagactattattttggtcatttgcaactgaagagtttatgtaaattgcccacatcactcagctagtgagttggagttaagattccctacttgtaactactacagaatataatcttatggcagaatattcctctcttcttccatgaatattttctttgcattaactaaaaggttactcattttattacagggctaattgggtttgtttttaattggatgcacatccatcagttgattccaaatgttttgaaaataaatggaaaagttttataaactagagccagaataagagggatactgaattctttttactatgatgtttccttgagagaatcattaaataattaaagtagaaggatgtttacaaatcttgcaagtatgacattctatccaagccacactaaagttatcaaagggagacactcaccagttatgaaaatattcccctctactctttctcagttaactctaaaattagatggcaaaggcatcaaaacatctcactatctcaaatatttcctcagtgaggtcgtgatgtgaacatctcttatctagattgaaatcccaccttgagtcatatgtggattaaaaaaaaaagctattatctgagaaagtctaaataaaaagatacattttacctaggctttaatatctaagtttttctgtatagaatcagttgggcaagtgagtctcttggaaaagtgatttgaaaactgtttttattaataattggaatacacacacacacacacacacacacacacacacacactcttattcctcctcaagaggcaagagtacatggtgaagcccttaataaattcacctcactgtagttaaacagcagactatgatattgttgtagttgttaatcaaagggactctgaaaagagacagccagaagtggggaaaaaactagtatagaaaaataacgattgggcatttgagtatttggaaaaaacctggtgaagtaactaggttttaaaagactgaagagaaagacaaatttcacccattgcaaaatataacaacgatataaaaatgagacataagctcctggataaaaataaataatgtatttttttctctctattatatctcgaattttgctttcaccaacaaactgcatgtgaaatacgaaaaaagttaaaaaatatggaatattaagggactataagatgagaaatttttaaattgttataacctaagtaaaactgctaaagctagttgtagcgagatctgtcttacataaattttccattaaatgataatatctttgcattcatcataaacagaaatgtacattttaagcaaaatcattataatagaaatgataatactccttacctagccttcttcacgttaatcttaacatagactagtgaagaacatagcaaaggtagtgcttgaaggaatgttcttattgaaagaaatctttcctcagattgatcaagaggcattgaataatcataataattcaaactttaatcttgcagatggaatgaaaatgtttaaaattagaattattgtcagagcttaaatattgttacttacacaagccaaatacattaatattatgagcactattgttttagctaatgtgtcttttactctgcagagtacatatagactagtctaaaaggttttttttttttaatgcttttatagagcacgagcatttgtgcaggtggctgagtagactaagattttttccaatgggttgatttgaccacatcattaataaagtagaaattctggagcccctactttttattcttagtctgacattgtaaattctttcagatgctacataagcattttaaagttatgtgccccaggcttactttgttcagtagaaatgcatgttaattcatcaaatgtctattgataactttacataaggaatagtgctatatactccaagtgtgtcaggaagtaaaagatatacagtctgccaaggtattgaaaattgcatataggccaacaaacaatatataggtaactgttatataagacagaatgtgaactaattcagagaatattttttaaagtacagagcatgtttttcattctaataaatgtacaaatatttatgtcaaatgaaaatgtggctgcatcataattcttatatgggattttaaatataccaaaatccacggatccatacagtagttcttactctgcttccctaattttattagttggacataaatgcataaatcgataagatgattttggagcgggaacctaactttttctatagttccttggaagttaattgatttcttaagtgataaagtccaccactattttgagtaaggtttagttaatgatttctgtttaacatgtgtgatttctaataaaaagttctggatttattttctcttgttgaaagttgttcattagaactgacacctgagctaacataagcaaaagtcattgtaagtccacacgtttgcacagatgggtgtccccccaccatccttaggtttgagcaatggatttttacaagtgaaactcagtgcaattaatcacctccaacatgagaaaatgctctttaaactattttaagtcaacatttacaagagaaattggcctataatacacctcgggttcttaacctttttgagagctatagaaacgctgcttctctataaaggtaacatatattgccaataaaatacataagggaggacatctacttataaaactcagaaaacgatttaataggaacagttgttttattagccttctgctctttaatggctgagatcatcctggggctatttaaaaatgatttaatttgtcctctaaacacacagatgagttccaggtgtgtatttcccccccccacccccgctccatgaatcaaccatgtctgcactgacattaatagcttggatcgggaaatctctgtaataataaatctatcttttaagttggtcatttaagcagctttaagtatgaaaaaagtgaagtattagaactatttcaatccatgatgccttatagattatactttaagaatacgactgtgcctcactatctgagaactggttctaggaactccagatactaaaatctgtggatgcttaagttccttatataaatgatgtcatatttgcatataacctatgcacatcctcctgtttacattaaattatctctagattacttataatacctaatacaatataaatagtacgtaaatagttgttacattttattctttgtgtttaatttctaggttcagggttacacatgcatttttgttatatagataaattatgtgttacaggggctctgagtacagattactttgtcacccaggtaataagcatagtacccaacagggagatttctatcctgttaatttttattgtatttcctgaatatttttttatttgggaaacaatttattttttttggaaatttttgtgggtacatactaggggtgtgtgtgtatatatatggtatatatgtgtatatatatgtgtgtatatatataccatatatgtgtatatatatgtgtgtatatatataccatatatgtgtacatatatgtgtgtatatatggtgtatatataccatatatgtgtatatacgtatatacacatatgtgtatatacgtatacacgtatatacacatatgtgtatatgtatacatatatggtatatatgtgtgtatatgccatatatctatatatatggtatatatatatacatatatgtatatacatatggtgtgtgtgtatatatacaccatatatgtatatgtgtgtgtatatatacaccatatatgtatatgtgtgtgtatatatataaacacaccatatatgtatatatacgtgtgtgtgtatatatacacacaccatataggtatatatatgtgtgtgtgtatgtgtgtgtgtatataatttttgtgggtacatggggtgtttgtgtatatatgatatatatgtgtatatgtatatatatacgtgtgtgtgtatatatatatggtacgtgagatgttttgatagaggcatacaatatggaataagcacgtcatgagaatagcatgtcacctcaagcatttatcctttgagttataaactaattacactcttgaagttattttcaaatgcacaattattgactatattcaccctattgtatcaaatcagaggttatttgaatttgcagatacagaacccgcagatacggagggcccactgtatatcactaaatcattcatacctctccacctgtacaaccaccaccatagttcaagttattctcatctttttctgtgactgcaggaagaacttgacaatgactggccctattttctttctggatttaacttaattctcttttacacacaatcatctagcatgatatttacatagtttaaggccttagcacttgctgttccaactccctgggatgttgttcttccactctgcatttcacagctgaaccccagaaagattatgtcctttgttgatttaacccttctcagaatagcatgtgtctctgttactgcatacatattgaaactattcttagttttttgttttgttttgtgcttatgttatcacatactatacacaccaagtctgtaggctgtttttttgatattctagtgatttttaatgataatatttaatacatatatgagaaaagaacctttttaatgttaagggagagcatgatctgtgaaattatctgtctttaatttatctttggaaatgaacatttttcaaagttttcattagattgtattcaaaattggtttttattctaaaaaattaccatgttactatttcatatttaaatgcaactaggattagacaagcaacaataataatttttttcttacctgggagcctacatgaatactgagtgtattaagatatcaactgagatatcttgctatcttagtttgaggagaataccatatatttggggaaatagagagaaagtggagtgaacatgtaatttatgtctcttaaaggtgactcaaatgttctttatctgtatcttaaaatctttagtgagcattcttccttatgtttaggctagttttctctctgagataggtaaagtaagctactttgccttagtatgcggatgtatgtgtgtgcacgtactcatgtgcccatcttgtcaatacatggagagatggaataagacgaatgtagtatgtctggggtagaaatttggttgcaggagagaggctgacacattcacaagcagcagcaagggaagagggattactggagtagaggcaagggagaatttatttacttaattacataatacttatttagaatctacagtgttcccggtatattgagttatatatgagaatgcaagaaaatgacatcactagtttaaagatacaatgtcttctgtttttcaaatgtttcgttgattttgttttattcaatactgtttagtacaatattaacagagtaaacaacagtatgagtccttctcatgtttcactttgattgtatcattgatatttaatccaacgtaaaattcctaaccttcaaaaaataattctcacttaatgttccagtggagtttgttcccaccatagtactgctggcctatcacaatgctgtaggtagttgtagacttgttcagtcctgttattggtggtgacttcctcatgtgctgggacctttattattcacagctgaattcccagagcataagagtgccttttttttttttttttttctttttttgagacagaggctcgctccgtcgcccaggctggagtgcagtggcgcgatctcggctcactgcaagctccgcctcccgggttcacgctattctcctgcctcagcctcccgagtagctgggactacaggcgcctgccaccatgcccggctaatttttttattttttatttttttttattttttttttatttttagtagagacggggtttcactgtgttagccaggatggtctcgatctcctgacctcgtgatctgcccgcctcggcctctgaaagtgcgagtgcctgttttttaatgtacaacaaatgtttcttgaagacacggcttttacattagcatattacatgaaagtgtgagggtcattaatatgtgtgaagaccagttaggattttaaagttctgatcagatacgttatcaagctgatagattaaattaactgattaatccaaggaattaacattaacaagcaatgaaatggtcagtatccaagtattgaagttgtatttgggttttacctaatattttccttgatcttactggctactttgttgtctaagctgaagaaaggccttcctgattacctttatttaaataaaataacagtggtgaaggtaatttcaaaaaatattaactatgctaaaacatatacctgtggtttgatatacaagaagctgcagaaggttctcagaaatatgtaaaacaatttattcccaaggtaattgataattgtatgcattcttacagaataagctgttataaaatttcaaactttatctaaaactcaatagcacgtctcataaaatgaactaaatagttctgtcgggcataagaatgtcggcttctagtatagaattccatgtatggtacaaaagttgtagagagattgtgtaattgctacattcatcgtataattttagaaaaatcctcttggtaatttatatggtaaaaattgactgttacaattagaaacataaggcatattttgtctcaatggattttattgagtatgctaaagcaatacacactacatatcgggtaagtgtgtgtactatgaggggagaagtatatggatacacagatcatgatttctatgtaaaatttatatcaggcttgtatgggagaagatacatgacaagttaaaatataaaatgaccacataattaaagtataatttaaattgggattattataatttaaatattttcccaagaatatcttgaatagtaatctttaaaatttttctttttttgatttttttattatacttttagggtacatgtgcataacgtgcaggtttgttacatatgtatacatgtgccatgttggtgtgctgcacccattagctcgtcatttaacattaggtatatctcctaatgctatccctcccccatacccccaccccaccccaccccaccccaccacaggccgtatgcagccataaaaaaggatgagttcatgtcctttgtagggacatggatgaagctggaaaccatcattctcagcaaactatcgcaaggataaaaaaccaaacaccgcatgttctcactcataggtgggaattgaacaatgagaacacatggacacaggaagggggaacatctgtaaaatctaaaaataatttagtttcaaaagataactttaaaaatgtctaaatgctagtggtaaaaattaaatatgtagatgatttattaaacattttaaaaacctcatgaaaaagggaatgtgcgacaaaagactaatttgcagctatcaaaaaataggaacagaaaaaatgtgctagcatattaatataaatattaggtgtcattgtgtgtccgagcaacattgttatcagttcccatctagtaatgactctctgtgtgtgtgcagtaaaatcaataataaaggggatgaataggacgactttcatttgaaactaaatctcttggaattgtgtgagctactgtgccacctatcagtggaatgatgaaataattcatacatgaacaattagcttaaataatcagcttaatttagtcaaatttattacaggcaccagtttacaaaaataattggtgcccaagatatttaatacttgggaataccagaattagagtatatcggagacaaagtgaaatctggatactcaatatgatacgacttttttgtttaaacctgcatatttaaactctcctttggtagttggatgctggctccccaaggatactcatgtcgaaatccctagaacctgtgagtatagtacatgatacatgacacaggggaattaaggttgttaattagctgatcttaaaatagggagggagattaacctggattacctgagtgcacactatgtagtcaccggaatgcttaaaaatgaaagaggcacaagagtaggcctgagtgatataatttgagaaagactatacctactgttgttcgctttgaagaatggaggaagaccaggggttaaggaatattggaggtctataaaagctagaaaagggaaagaaacatgatctcttctagaatttccagaaaggaacaaagccctgctgttgcttgagtttagtctaataagactcatgtcagatgtctaacctactcagctgtaagataaaacatttgtcttgttttaagccattaagattttgggaatatgttacaacagtaattgaatactactgcactctctgtagttttttttctgttcagtttcttagctctggtctgttgtacttggctgttcagctttggggcctgacaaactgccctcaatggtagaagtccagcagtgctcatttctatagggttcgggacttgaatcacaaaaggcacgaagggaaaaactttttccctcaccctagacgaaagtccatattttttttttttttttttgcgaggatctgacattttaaaagatgtttagcagtagaaatccctactgttttcagggaatattatcctctacgcttcttacctggcacagtcatgggacaattacatcaacacacaatactttgtcctatatattctgtattatttttaattaacagcatcaactgacaaatctatgttgaaccatatgaagcccaggtctcacctacagtctcttttccagtaatattcagacatatatcagttttttagaattcttgctgggattgcttcttgtatggttaaatgaatgtgctcatgtgcatgggtatataattatgtgcatgcacacatggacgtgcgcacactgctggacatccaaaattgagcagcgatgtgcacagggcataagaatgtatacttgatacttaaaaggatttctaaaatttttacacagtaactgttgccatccttaagatagctctttccttaagtatgcaaaaacagttgggctgtttcaaatgcttatggaagcatctgaaatttccttgcagaagaatgtctttgttttaaatttacatgtctaaataccaattggaaaggtaaagatttgctcaatagaaaggagtaatctgttaaaagtttaaaaaataccgatttcttttggaaaactgcgaagtcctgaattcagaggtcttattcttgtttattctaatcaccccatctgaaggaagcataactttccccaatgactgaaataataacagtaagaatgagaatacatggaaaatgatattaaattcttaccataaacaatcttaaaatttttgctttgaggttaagttttctgagaaattccatacttgcttaaaatatgtttttacaaagtaataactgccattattatttacaacacattaagtactatcctagttatttcaattgcatcctcccattaatttcctagcttggtaggattccccccccaaccagaaaccaaacttaaaaactaggaacttccagtccagtctgtatccctagatgtaagattctgacctggataaattgataatgctgcgaaacaaagtgacctagaaatccagctaatcttatcagtgctcgtttttaattgagaaaatctaattactcagataattgtggagcgtgttgcatactcttaattactgtaaaaacaaaaaaaaaagacaaatttatgctgctatataggcctcacgccctataaaactggatatacttttttatgacccatttagcttcattcattttatcagtgcatagaatgcagtatgttttccttatttcatactattttgttttactttttgtaaccataaaacatcagctttcatgcacaagcatatttttggttggatgagtttgtttaattaattaagcatttgagaacatcagtggtttagttttgaggtgtcacaaatagaaaaacttagggaaaatttctcattgtattggaaacaatttattctgcattaataagttgatataatttggctctgtgtcccctacccaagtctcatctcaaattgtaatccccacgtgtagagggagggtcctggtgggaggtgattggatcagggaggcggttgtccccatgctcttcttgtgatagtgtgtgaatgctcatgtgatctgatggtttaaaagtatttgacagccttccccccgaccccactgccctgtgaagaaggtacttgcttccccttcaccttccaccatgattgtaagtttcctgggggcctccccacccatgtagaactgtgagtctattaatcctcttttacttataaattacccaaccacaggtactctttataacagtgtgaaaacagactaaaacagaaaattggtgcccagatagtggggcattgctataaatatagcaattatagaagtgactttggaactgggtaactggcagaggttggaacaatttggggggggggtcagaagaagacagaaagatgagggagagtttggaatttcccagagacttgttgaatggctttgaccacaatgttgatagtgatacggacaatgaagtccaggctgagatagtctcagatggagatgaggaacttgttgggaactggagtaaaagtgactcttgctatgctttagcaaagagattggtggcattttgccccttccctagacatctgtggaactttgaacttgagagatgatttagggtatctggcagaaatctgtaagcagcaaggcattcaagatgtgacttgactttttctgaaaacatacggttatatgcgttcacagagagattatctgaaatgggaacttttctttaaaaggaaagcagagcataaaagtttggaaaatttgcagcctgtccatgcggcagaaaagaaaaacccattttctagggagtaagtcaagcctgctgcagaaatttgcataagtaaagagaagcagaatgttagtagccaagacaatggggaaaacgtcttcagggtatgtcagagacctttgtgccagccccttccatcacaggcccagaggcctagaagggaaaaatggtttggtgggccaggcccaaggccccactgctctgtgcagccttgggacctggcttcctgtgtcctagctgcttcagctccagccttggctaaaaggggccaaggtacatcttgcaccattgcttcagagggtgcaagccccaagccttggcagcttccatgtggtgttctgcctacggctgtgcagaaggcaagaaatgaggtttgggaacctctgcctagatgtctagaggatgtatggaaacacctggatgttcaggtagaagtctgctgcaggggcggagtcctcatggagaacctctactagggcaatgcaggggggaaatgtggggttggagcccttccccccaccacagagtcctcactggggcactgcctagtggagccatgagaagaggcccaccatctagaccccagaatggtagatccactgacaacttgcaccatgcacttagaaaagctgcaggcactgtgaaagccatgggggctgtgctctgcagagccacaggcgtggagctgtccaaggtcatgggagcccaccccttgcatcagcctgccctggatatgagacatggagtcaaggcagatttgggagctttaagatttaacgattgcctggctgcatttcaaacttgcgtgggacctgtgtctactttgctttgaccagtttcccccatttagaatggaaacatttacccaatacttatacctgcattgtaccttggaagtaactagcttgcttttggttttacaggcttgtaggcagagagaacttgccttgtctcagatgaaactttggacttggaattttgacttaatgccgaaatgagttaagactttgcgagactgttgggaaggcatgactgtgttttgaaatgtgatgacatgaggcttgggaggggccgggagcagaatgatatggtttggctatgtgtacccacccaaattttgtctcaaattgtaatccccacgtgtcaagggagggaactggtgggatattggatcatttgggggatgggggatgggtggttcccctatgctgcactcatgatagttctcacaagttctgatggtttaagtgtctggctgttccctgccccctcctgccacctagtgaagagagtgcttgcttcccctttgcctttcaccatgattttaactttcctgaggcttccccagccatgcggaactgtgaatcaattaaacctctttctttctaaattacccagtctcaggtattccttatggcagtgtgaaaatggactaatacataagtatactaagtgatagaactacctagaaagaataaatccagattaacttaagatgctcttggaatcagtgtttcagtgtaattgactgtggacttaaacagctttaatggagaagttgcatcttacgaattgtttctttccctccggtcttagtcccattacttgaaagaaggggtacttggtaaatgttgattacgttattaaaaatattttaacttatttttagtaaaattgaataactctcttatattacaatcgtggaacccttgccctttagcaggccatttctcctaaggaatttcagacatccctaatcttaacatctttatataatgtacatactgttgtgcgagtgtatctttctaggggcccatttatcttaaaccgactttcctatgttcctatcatttaatgtgtttttccattggtaatgatatatttcttctgttccaggatgggccagatatcagatatcacacattgcaagtgtaaactaaagcccagagcagaaattcaaatggaattaaagtataaataaaaatataggtcagacagaatatggataggttgtaggaatagatcagatgccagatgtagattttaaaaaacatgttcagaaaatatagtattgaaaactaagaaagagcactccagaggagctttaaaaaaggagagcgagagaaagaaaaataatagaaaataaaactggaggacattgttaagtgaaatcaaccaggcacagagacacaaatattgcaagttctcactcatatgtgggagctaaagtaaattgaactcatggagatagagagtgggatgatggttaccagatgctgagaagggtaagtggggaggacaggataaggagggagtggtaaataggtaaaaaaaaaaaaaaaaataaaaagtatatagttagatagaaggaatcagatctagtgtttggtagcaccctagagtgattatagttaccaataatttatatttcaaaataatagttaaattggaatttagctaacataaatgataaatgcttgaggtgatggatgccctaatttccctgatttatcattacatgttgtattcatgtatcaaaatatcccatgcaccccaaatgtacaactattatgtagtcataataactaaaataattaacgaaaatgaacctcatctaataattggacatttctctcgctagctataaataccaggctttcagtcagctctacttttagtttatgaatgaataccatagaaacacctgtaatgtcctccagtcaaaggtgttgatcacccaaagctgagcttgttaaatttacagggaaagggtaagcaccaccttcagggaatagtcatagcctctcagaagaggagcatgacggaaggatacttaagagttttacacgctgagctggatggttctaagtatgctctcgacagattggtcagaattagcttaccagatgagttgctgtgacagtctgtggtgttatcttggaacacatgagtttgcccgagtttctgtaaatctacttgagcttaaacaatttgatatgtttattttccccaaacgattttatgttagccatcacgggtaattatgcttggcataagggactcttgcttgatataggggggagtctgttgtatccgagttcttagatcatcctatattacatcctatattaactctttaggatacagggattgattagggagtgatatattagttcacttacatagggagaaatgatcaactcagaatatttttgtccctttaaaacgtctacctctatgtaagagtaaagagcataggctcttgagctgcactgtctttgaatcctagctctgctacctaccagatgtgtgaccttaaaaactttacacaagcaattagttcgtcagtttcctcatttgtgcaatgtggttaataataaatgggttaatgtatgttaaatacttcatatagtacagagtaaagactagttattgtaactcatgctattgctgatttttaaatgatgtttattttaattcaattgctgttcccccttgtaaacgtagaaagaaaaggttaggaaagggagatgtagaattctactaacaatgacttatattagtagttgggccaataggccctccaaaggagattcatcttgtgggatgtaagtgcatatagtagaatatgtcatgaattaataacggcattcaaaaatgaagcaaagacctgtttaaatgacctcagggagaaatcagaaacttttacagcagtatctgctttaggaaatagctagtgatttaccatttcaaattatgaatggccaaccaatgccctcatcagttaggcattgacagcccattcttctagttctatcttcttctgtaccggtttcaggtgtttccttctattactccttgaattggctatggcatagtcagagtatcaaaatcactggcttagttaggacctcctagtgctctatataaatatattggtatttttatctttttgacttggaatggtttcatttaacatgtaagatacttagatgttgagcccatccttgagaagaataatgtataaacctcaaagataaaacaaaatcctctcattcttgatcagtgcttttagtttgagcatgtcacttggattactgtgtctctggctctagcattaaaatagtcaacctctgaaatagcaaaagtggtacagaaactcgtatattttggagagtcatcacagggaatactatttagttatatttaaccaattgttgttatgcatctttcaggggtgagacactgaaaatattgcaaagacataatcacagcccttgatataatagtagtttgaaaaaagccgtattggggcacagaaggagtagtggcagagtgtgtgtgtgtgtgtgtgtgtattaacaaaatgggattagggaatttgtcaatgatgagatgacatttatgttttcacttgctgaaaactttagaaatctacttagtttgctaggtttgtagtggcttctgttttcatctgtagtagttacaccttaagtgtgacaaactttcatttacttaatcagtttcagtctttctaaggctggcatgatcactaaatgagaatagactcatcttaattttcacatggcttcaaaattatagaaatattaatccttccaaaaaatgtttagatgtagtccaaaagatttgtctgtggtctctgaaaagtgtttcactggagataaagctaatccagtttaaagtaactttgtaatcaaaattaatattgcatgcgctaatcataggctctccatgccttcacttctagtcagatccaggctcattgggagtcaagtgccagagaggtcctgcctcaggacctttgtacttgctgatcctttaatatggaaatgtgttttctccagagagtcatcacaggattcaactgcttatttcattcaactctatttttaaatgttcctgtagttgaaaggctttccctctctaaatcctctcttaagtagagccaacctctccatgccttttgttccctctctttaccttgctctatttttctttataggacttgccatgacctgattttgtgtagcatatttatttgtccttatttttatttctagtcctagaatttaagcttcataagttaaggactttgtacattttattcactgctatatctcctggtcctaaaacagtaggaacttaaatgtttaatgaaaaacataaatgaatgattaaattactaatagaatctgtattccctctccaaatgtacatttggtattgtactaatgtatataattttatgcaactcataaagtaatcgacatatttatattgctttcaaaattagcgccctcaaatacatttaggttagaaaaactaaaattaatacatcaattgatcatcaagcatagaaaaggaactccaagaacacgtaaacattttacatctaaggtcttactatacttttggtattaatgtatattgtattaaatcattgtaaatgtagttttctattccgaatagcaatactagaggaatttactttaaattctacattctctgctggatgatcccccaaaactgctgcccagataattacagttccctctcttagcttgtcttccagtctctaatttcctcctactttaaatcattgttcacatgccaccacaattagtgtttgaagatgacaggtctaagcatgtcattctcttgttaatacaaccccatgttctttctaaacaaaatccggctttctatgcctgccttttattgcttcccaccatgtgttctgtacccattcttaaactaaccttcagttacaccaaccttgggaatacatgttcctgaaccacaaaagggtttcctccatgtttttatcttacagaagtcacttaccttagtacttcatgcatagtctgtactaagtaagggtttattggtgatgactatgtgttcaatcttttaaaaactttgccactgtcctagaacttaaagatgactattccatgaagctggtttatatttcaaagataaaatgtcatatttattataagcctcctgtttttttttttttctggtttttcctggatagtaatgtttactcaatttactaataaaactagaatatatcacttggctataagctgtagtaccacagaatttgaggtgacacagaaaaattattcatctgctcttatatctttccaagggcatgattagtcttgatggcctggtgcaactgaattctattaattcttatttaaatcatcagaaacaaagtgtgatctcgtgtcactgaattagctaaacaaccttgctgctttaacacataagtgccaaaatagaaaggagcttaaaacaatagtttatatgtagcccaggtataagtccaatgtaggtgttccttattggtgactgatatggtttggctgtgtccccacccaaattgcatcttgaattcccacgtgttctgggagtggcccagtgggaggtaattgaatcatgggggcaggtctttcccgtgctgttttcttgatagtggtaagtctcgtgagatctgatggcttcataagggggagactccttgcacaagttaccttctcgtctgccaccatgtgagacatgcctttcgcattctgccatgattgtgaggccaccccagccacgtggaaccgtaaatgaattaaacgtctttcttttgtaaatcgtccagtctcggcaggtatttatcagcagtgtgaaaatggactaattacagtgactaatatttttctatatttttctgcctttgttgtggctctaccttcttcacagatgatgatgttttttgtttttttgttttttcatatagccattgaagagggggaagcaaatacagaaaagccacagtgacttcttagaagccttgtggtagaggtgatgcatatgtgctcccttcactttccacatgaaggggatgtgtgctcatgaaacatgtatatagccatgcctgtctacaaggataatgcagtggctggctgagtggctgcttctaagtgaaaaatctatactttaaaagctggagaaaggacatggttgtttgacagcctgtctctgccatagttaggaactatcagcttcataaataaaactatctggtggtcttctcaatggggagcttaattacctcaagtcaataagaggaaaatatccattagattcaattctatgttaagaaaatcgtggtcccagtgggattataatttctaaaatgaaggaatgtcagtaaatttaatggaaccttaagtataccatagaaaaaaatgatacattctgacattgaattttgttgatttaaataaatttattgtggtaaccatgctggttcccttcatgacatatgaatggggaattaaataatatacacaatgctttgctgaaaagtgttcaatttgtgttagatcagatacacttgtcttggtgacaaaattggcacaaagctttatgaaacccacgagtgggcaaagattgtatcagaaatatctaacggtataaagcaattttgtttttcattgttacgatattgacacatctccaagaaacacatccagggatgaatagctctattccccaaattctaaagacagcatctgacggaaatctaatttcagtcttgttattaaataagttttcttagtgtctgccatagtagacagtgtttgcaagatagcatattcattttttaacatatttttcttttgtgtgttataaataaaattaataaactgtcatattctactggtatccactgacgtttcttagttttactttaatctcaccattatgtaaattgactttgacagaatatttttagttgaaacattgctggaaattgaataaagttatgtgtgtgtgtaactcctgtgaaacactcaatgttatatctatatctcttatcaatagttaagcctttatgaaaataattgattctttagcatggtgtattgcacctttctcccaaacagagatttacagacacatagtagggtgtgtatatatatagatgagcatcaggtataacacataaatgcttatatatctaattggtgttgaggtctgaattaatgtatttttgaaagcatcggttcttgtgacagtagaatcaaatacttgcataatgttttatagactagttataatccttacaaaaatcctattgacaaaatagcattagcttaatattccagatgagaaaatgggctccaagtaattagatgctttgttcctgatcaaacactaagtggaaaaaaacccacctcattacaaaattttcttgttgaaagacttcagactgcctctaaaatagaggagagaagaaatagtctgacactctaaattggatataaacgtcagaattgggactataagtctagaaaaagtaagtatgtttaatggcacatatagaacttacagtcttaacaaatgaagctttttggtcaattttggagtatgatcttctataacacggaaaatcattttggggttttttttcctgaataattcataaatggagatggactaaagaaaatataaaggaaatagcataggaaaattttgtaaaaacttatttggatattttatgatttttctacatctgttttctaaattttacaccagggttccctttaaatggctacttttttggaaaagaaatctgagtatatacccatatgcaaatgagcctcaaaaaatactaggtgcctttagcttctgttaatatgaaattactaattcatgatgagaatattttattttaatgttagcggtgttgcttttggttggaagccaggtaaatgtaatcctattactatgcctataatgcggagtagttttgtttaatggtatgtattaatgcggcattggacagcttgaattgaatcagagaaatggtgttggcaagcattaaagactttaagagaatgcaaattttatatgcctctttttattgtaaattgacaatatataattgtataaatatatggcatacaaagtgatggtagaatttatgaatacaatgtggagtaattaaatcaagctagttaacatatctatcacctcaaagacttttgtggagagaacatttgaagtgtactctcttagcagcttcgaaatgagcaatactctattaactatattcatgctgtgcaatgcatttcaaattttcatcagaaaaatcagctttgaaagagtgtatgcaaaaattttataagcttctcagatgatatgatcttatatgtagaaaattctagagatttccacacaaaaaacctgctagaactaataaattaagcacaattgcagtaaataaaatcaatatacagaaataagttatattttatgcactaacagtgatgcagtccaaaaaggagattaaggaaacaattttatttaaaatagtaacaaaaagagtaaaatacttaggaattaaccaagaaggtggaagacttatacactgacaactacaaaacaatcctgaaagaaattaaacatttatttttataaataaatgaaaaggaaccccaggtttatgaaatggaacactcaatattgttgttgaggtatccgagttactcaaaacaaactacacattcagtgccatctctaagaaaatcccaattagtttttctgcagaaatagacaactctatcaaaaattcccatgtaatctcatggatccaggaatagttgaaacgatcttgaaaaaagaatgaagttgaagggtcatacgtcctgatttcaaaacttactacaaagctaccataatcaaaacactgtggtattggcttaaaaaaagggaatgtagaacaatagaatataatagccctgaagtaaactctactatatattgtcaaacaattttccataaggttgccaaggttttttaatgattttttaatgaagccacaaatgttgctaagaaactgaatatatacatttaaaataaatgaagttggactcttataaaatacacaaaaattaagtcaaaatggatcaggaagtaaacgtggccaaaagtacagaacttttagaagaaagcgtagacatttggaagaaaacataaacattagattgggcaattaaatatcttggatatgacactaaaagctcaggctacaacagaaaaattaggtaaattgaaatgcatcaacattaaaaacttctgtgcatgaatgaacaccatcagagtgaaaaggcaacttacggaatgggagaagatgtttgcgaatcatatattcaatagggaattaatatccagactgtgccaagaactcctatatgttagtccattcttgcattgctctaaagaaatatctgaaactgggtaaattataaagaaaagaggtttaattggctcacatttctgtaggctgtacaggaagcatgatgctggcatctgctcggcttctggggaggcctcaggaaacataaagcagaaagggaagggtgacctggcaggtcatatggtcagaacaggagcaagaggggtggagggagatgtcatacacttttaaacgaccagatttcataagaactctctatcacgagaatagtaccaagcggacagtactaaaccattcatcagaaatttgccccagtgatccaatcacctcccaccagacaccaactccaacattggggattacaattcaacatgagatttgagtggggacacagttaaattatatcatcgtagaattcaacaacagaaaaacagcaattaaaaaaatgaataaatgagttgatcagaaatttctctaaagtttggccagtaagaccatgagtagataatcgatatcgctgatcattagggaaatgcagataaatcccaaatgagatagcacttcacacccattaggatgatgattattttaaaacaccaaaaaaaaaaaaaaaaacccagaaaataaatatggttgaggatgtggaaaaatttgaacacttgtgaactgctggagggaatgtaaaaccttgcagtcactgtggaaacaaatatgttggtttctcaaaatatagaacgtagaattaccatgtgatccagcaattccacttctgggaatatactcaaaagaattgaaaaaaggaccttcaaaatatatttgtacacccatgtttatagcagcattattcatagtagcaaaagatggagcaactcaaatgtccatctgaagatgaatggataaacaaaatgtggtaaatgtatacagtagaatattattcagccttaagaaagttctgacacacattatagcatggatgaatcttgatgatgatatgctaaggggaaaaagccagatacaaaaggataacatatgattctatttgtatgagctatctagagcagtaaaatgcatagataaagtagaatggtggcctctagaagctgggggagagaaggtatggggagttatttaatggatatgaagttttttgggggaagataatttttggaggtggatggtggggatggtgacacaacaaggtaaatatacttaatgctgataaattgtatgcttataaatgattagaattatatgttttatgttatatatattttaccatgataaaaacctataagctttcttgtaaagttttagaaaatgtttggattcataagtgttggatgattgagttttatagtgtaaatttaatgtagttgtgctcaattgtcaattgtatgcctattgtctgtgagtatatattttccagattgttctctaaacataatttttaaccatttagttggaaaaaaaaaaaacctcaacttaaacccaaatggaattatgtagtccattcagtgcatactgtgaaatatattagtaacattttattcattttaaagattttcgttatcagtttaggaagaatgataattttataaatccatagcatactgttgttgtgtgcgggtaatactcattatttaggctgtttttaatttggggtcttttttaacagataatcaacaaacgttttttatttgcacacagtactcttagtatttcgttttgcttcagtaatagtaaatgaggctggggtttggagagcacgattgcttttggaaaagtcaatagagacatgtttttatcgctactgctttttttctatgttaattggaatttgacgtaaaattgattctgaaagatatcaaggtagacacttgaaatatagattggacaataaggttggtagaccattactgtgctttgaactagagtcattaatgtgattgtgaaaatttttactttgtatgttattcatcacttttctcccttagtggtgtttagagcatgatgagttgttactgtactgacaagtattagtctagtagtaatttctcataggctgacaagtgccaaaattcatcctcacatatgaatacactaaagcagacaaacactgttttcatctctgacactatctacagtttatcgtgatacattattttggcctacagggtcacaggcaaattatatttaatcactgctttaaactaaaacataactataaatatttttgcactctttaaatcagcataacaatccaatagacttcaagatcctgagataatatttaataacattaaaatgatttaaaagtataacgattgtattaaataattctgaataaacaatacttttgaatgaagaagattaattagcatgatcattatagaaatggtcctattaatacaaagatgtcaagagtcatttctggttcaagtcaattaagctacgttttaattgaaaaaagctgttcattgtgtacagcggtagcactcctgacatatcatataaatgaccccattaatgcaggagaaataaggtcaactgagacatttttactgaaaccaattatgttacattttaattgaaaaataaaagctgcttttattcaaaggaagcaccactgacactccatcatattccatagcctcctaatattgcagtaacttcctaagcagtctctcagttcttcgcattatacaaagttatctttttactacattaattaggtcatgtgttccctatttaacaccttctgaagactctacattgtacttagaaaaatgtctggagtctgaaagcagccagcaagaccctgtgtgatctgtcccctgcttgcttcttgatctcacttcacactggttcccttacttcaccaggctccggtcaagcaagaacatacttcttctccctctttatatagctgacaacttcctgccattcagtctgagccgaaaggtctcatcttcagaagaatcctttgcagtctaccatatgtaaaagagctctcctgatgagccctcccagccattcctgtatcctattcacacttcttgctttaaaatcatcatcattatctgaaattaccttgtttgattatctagcttatttcttctctgcttcccctactagaatgtttggtgtcaaggactttgtccgttggcttcagtactgtatagccagtagctaggagaatgccgaagagatggtaggtgaaaaatgtttgtggaatggataaataaatgaatagcaatagtacagaagtatgccatcttatttgttaataggtgaccatcggttgatagagtttcatttctcctgattgcttaactcagtaacactctcctgcaggagagctagtcaggactcagggtttttttgttttttttgattttttttttctttttttttctttttttgagacagagtcttgctctgtcacctagactggagtgcagtggtacgatctggcctcactgcaacctctgcctcctaggttcaaatgattcctcctgtctcagcctcccgagtagctgggattacaggcgcgtgcaactatgcctggctaattttttgtgtttttagtagagactgggtttcactgtgttagccagaatggtctcgatctccttaccttgtgatctgcccatctcggcctcccaaagtgctgggataacaagcatgagccaccatgcccagcccgaggactcaggtttaagtatgtgaacagatagttcagaagacgttataaactgttaatggaaagtctggaaggaacccagagatatgttttgtttgatctacaccttactacagatttgggtttctgttagcagatctagcagctctggggcaacattctgcaatggcaccatcctggtagtactgaggagtgctactctcctccctcaaagcgggcacattactgttcagtctggagctgcactcgccatacacacagtttatgtaactccactgacagactctgccactccagtcatttatggcatctgactttgattccacatggaaatctactgggtggacctgtcacatttaaagataatcatcatcatcattgtgtatgtgtgtgtataagttacattggccatttttctggggactgagtctgtctactccaaaagctgtgaaaatagtaatgattaaaagtcctcagactctatgattgtggaaattctttgtattctagaagcacacaattctaagacttctgagtgtctctcttcagtctcctgtgaagagcatcaccgatttatcactaaatgagcagattatatactggggatttagtgtagaatgtgccatacagtagctgtgcttcttgaagaaatccctggataggccaggtgggtttatggtaagagataaaattaaatagacgctgcaaaaaaaggagacaacattattaaagtcacaggaacaaatgacacttgtaaacatcttggacatgagttgataacatttaagtgtagtccaaagagttcaaataaaaaggcattgcaatcacttgagagagagagagaaataatgcccggagagtacatttgggctatattttagagaaaggccttgataggtagaaatagggaagaatagcattccaggtgaaatagcaaggcaaaagcaccaatgaagaagaaataagaggaaggcatattcaaggtatagaaaatcatgtcattatgtgaggtacaaaaagctatcgagtgtgcatttatatatgaggtatcatgctaggaacccaggatagctagatcaaaaggtatgcattaaagacattttgactaatttccaaatgatcataatgatgcctatatgcaacatcaatatatgaagtattcagtttcccattccttgcaagtaaacctgaatatgtttaacattatatcactctgttcttccctcctgcaaccataattcataagttattttcaccaattcattcaccaagcatttattgaacactatgtatcatgtctctgattggcactggggaaacaaatgtctctaatctcaagggacatacagtagaatgggagagagatacagttcctttaaattctggacctttccatttctcttctattttcaatagagcttgcagtcatggaaaatttattctctgtggcaacaaagtagggcagatatttgccctggaaggtgaagagagatagagaaggctttctgcctaacatttatcatgaggtactaacaaatatgacaattgaataatgctgttaaatactatgtggcatactgattccatttcacatacttatgtctcctctttttaatagaaggtagtgtaaaaagaagtcctgtgttacagtaatgtttcttttattatctaattgatccttgggtacgttacctaataattgggtatgtacatctccacatacatagcagtggaatagtaatagttggggggatttttgtgacatttaagaagaataattacaagagtcaaaagtataatataaacacaaaataggaactttccatttttcaatgcagatttattcagcatctttgcttctgattccatgtatttttctgcttcagaattctttttttatcctctatcttattttacagttaataatttcctgagggactactttctgagtggaaaattgttagaatcctgaagaaatgtatcacatgggcctgcctgggtcttcccccgccccccccccccccccaagaaaaacctgcatctgccttaaacataagatccagtagtcagtatgaaattcatcaagctaaagcttatctcgtctgtagttgtagctctctgaaactttaaaaaaggagttttaaactttgcatatctgaatttctgaggtagcattatatatgaaaccaaaaatatataaaataataagaaaattgctaaagaatcactttgtgaaatgatgaatccatttagcttagttcttctgtttggatatgatagccttattgccatagagaaattgaggtaaggcattaagagaacaagcaaacaattttgcagtaactaactcatctctcccatgttgccaggtgtgccgcatattgctgagcagtgaaaggattaagctaggaaagaaagtggggaaagtgctacctggaaatcagaatgaacattgaatatagaaatgcatctaagggggaatgagaaagagaagagtaaattaggtttttcttgagtcctgtctttgttacttccacattttgtctacaggattaagcattcagtgcctgataagtttagtattgtgccagaggaccccagagaaaaattagaaatgatcctttccttctagcaactttcagtgtaacttgagagtcaggactgaccaaaatagttcaataggtctgaagtaaaattatttgtgaagtagtaaatttcactttatagtgtatgaatgctgtagaaatatatgagagaaatcaacaagggctgtgatggaaaataggaaacatccagaagtagaagttgagctgaaacttaaagatagttagaattggataagataaaatgagtattcccagttgcaaaacaatgtgagagcatgtttcgaaatagagaagagggatgggcataggaaaaacatacagatgaagtaaaagagggcattttatcttttttatttttttcattttacatgtctgttttgtttgtggacgcctatttggtctcattgttctggctttgggagacaggcaggggatgctgcggagcacatggcccctatttgtggtcgttttgctccaggtgaaaataatagccaccctttattgaacacatcctgtgtttcaggcactgtgctaagctcttacactttgttatctcgtaatcttgagaatacctgtgtgagggcaaattgcagtaagagtaaatggggggtttgattccgaagtctgagattcttgcctttatgaccactgacagttaaggggcttgttacataattacaggaactcaagagtcttggtcgttgaataacaatggatcaagtgctgtgctgtgacccattattttatcaagtggatggaataaaacatgactactgtgttcatttggatgagtaggagaatgctgaactttgaaaggttatggaaggcaagcctgtagagaggtaccaaaatggcatgtagcaacacgcagggaggagaaagacctggatttaaatgcagtctctgccatctagagctgcgtgagcttgagaagtctgcatcatcttccctctctggcccctaaagctaaagaattaaaatgtatcaccactgctctctaagagttcagtttaagtgacagcaatagtcaagagtgtcagtttgagttttcccccaaagcaaagcctgacagaaagccatgattggctgattatcaaagaaactagtaagaaaactcaggaacatgtgggacctggaaaagtgagacaaggaagaaggaaaagctaataaagataacattgttgaactgatgaccataataggtaactgtacctcaaccttgcctgggacattatagaaccttatagaactgtcctcagaaatgtccctttgaaggacaatttattttcctccctcctcttcctcctcctcctcctgttgctagagctaggaagtgaaagggtgttaaccctctaacagcagaaacaggaactgcagcaaaaatgagagatgggttgatgggatacagtgcaaaatacaaagaggcatctactgttcaaaataaacctataaaggaatctgtattagtctgttctcatgctgctaataaaggcgtaccaaagactaggtaatttataaaggaaaggtttaattgactcatagttctacatggctggggaggcctcacaatcatggtggagggcaaatgagcagcaaagtcacatcttccatggagacaggcaagaagagaaagcatgttccgggaaactttcttgtataaaaccatcagatctcgtgagacgtattcactatcacgagaacagcatgggaaagacctgccgccatgattcagttacctcctaccaggtccctcccatgacatggtgggaattacgggagctacaattcaagatttgggggaagaaacaaccaaaccatatcagaatcgaaagaaaaattataaagtcaaagtagaggaaattctggagagccttgaaagttgggctaaaactagatagaatgtgtatgtctcaacattttctattatatccctgaatcatataacttgttaagaatggggttacacaaaatttcagttaggttggagagggaaattcaagagaactgttgggtgtatataacaagactatagttaatagcaatgtattgtatgcttgaaaatttcaaaaagaatagactttaaatgttctcacaagcatgtgaggtaatggatatatcaattggcttgattgagccatttttaaatgtatatgcctatcaagatatattgtatactataaatatataaaatttgtcatgttaagtaaattcgaaattagaaaaaaaatggagctaatctctttaagagttaaaccctgaattgtagggaatttcttgctgacgaagactaatttggtcttgaagagaatttcatgtcaccatgaacttatggcctgacttcaaaccagtgatgagctgtggagggatatagggcactttgctttccatcagatcctctcttaagctgttttgcatcacttaattctaactgtaaagttgggaaaatgtagatggggcaagtgacagcatatggtttgatatatacttgattgtatccataagaacatcctcttacctttttaataagtagcttggagtgcttcctgccaaggctttcaccagttatccagaagattaaaggctgaagtagtgattgtccttggaatgtccctctatctatgtgtagatctgtggttttattcatttgtttcccaaattgatccacaaggagattaatcttgtatttttttcctgatgacttttataaactagatgcgtaagacatataatattgacatcatatcaagttgcccatagggttatttaaatatttgaagagatgtgtttgttctcttacactctctgaatgcttttggtttttagcgattttattgtcatcaaaaaccatattcgactacacatttttctgacctactagacattcacatttagctttgggtactttgtcattgtagaagcaagtataaagtaatgaaatttatgattcaatcagaaaacaagtattgaagctgctgaaatatgacgttctcagctttatttcttctacgaaaagtccaggttaatgtttataaaatatttttaaacttttttgtctgttcaggactgaatttcttgttgagccggaatggtgagataattctttcttctgtggaacaaatgcattttaatgatagttacttatatgaaaatgttactaagatttaatttatgcgcttaatgctgcttaaaataaatgtattcaataacaaaacaaagccaatagccatagcacattaattattgaatagactttctgtagttactgcaactgaatgacaggtagtaagaccttaatatttgcaatcacaattgtattcttctttgccctagattaagcttgctgattacagtgcaatgaagaaaaattaattagtttgctccagtggagcagttaatatagcacaagcgaaacccataccctgcttcctcctgtaaccaacttgttttcacttactctgccttttgatacacaaccattttcttgatcacttcccaattgaggaaaagtttaattaagtagctaatactatttagaaaatatagtgctaaggaaaaaacatgttattaaattcaaaccattgatatttttattgctatttaacttatattttatacctggcaagcaaataattgaatattgtttgaaaatatttgtaattaagaactcaagaatatgaaaacatcattgagttataaaacatgtattactcctcaaagagcaaatattcctgtgttgggctgctcttagttggagtaaacacattacctgcccacagggaacttttcatctattagaattcagaatacatttcagggattcttaccaaaaagatttagaatacagctatatgaatttatagaaatattttaacttcagaaggattgtgtgctcacttccgtatcttcctttaagattttagtcatgttccgttttttgtgttttttttccttgtctgaagacaatatttttagaggagagaatttctttgaaattgatactgtaagtaaatttactgtatttacttagaactactcattcacccatacaaaaaaaaagttgagctttcattattgagctctcctcattatgttataaaggaaaaagacattgtccttatcatgggagacaagcagatacatgggcaattcttcagcaatgtgatgagtagggaaagacatacatgatgtgggaaatagtgttttacagtcaggtcatgcattgaaccaaaactcaggccgtaaggaaaggctttgaaggggcagtggtaacttacctgacatgtaaaggagccagatgaaaaggatgttgcaggcagagaagctgtaatgtacagagaactgaaggtaaaataaaatatcagcttatggcttggcaaacactatggggaaagaggcacagaagtcacaatgatagtgggagccatctgcacaatgatttaatggctagggtgttatgtacagttatgtgtcttgtatattgcatcatttctataacagtataaatgctattgagtataaattagatatttattgacctcatattttacagatttgccgtgaaaatttctgtatgtttaaatctgcgataagtttgttattgactcattcatctaaattaatagcttgttcttcagaaaagaagttttgagactggttgtgatggtctcatcaggttgaagagatcatacttttactgtggcacctattttttttttttaatggtttatttctatttgagtaaaacagtggctaaggttctatggtatcgggataagatggtgataagtgatctatatgacagagttggcagaggaattaataaccatattgacttgggagagtgagctctgtatatagaatacacattttagtcaggagggcagagtggtaaaagtctgagatcttgagatgcactgcttgggtttgaatcctagctgtattacttaaaagctgtgtggccctcagaaagttagtcatactgtgtttcagtttcctcatctgtaaaatggcgataattgtatccatctgataagattgttttgaaaatatttaagtttaacatgtatgtatgtagttacatacatgtaaaagtatttaaaaaggtgcttggtagatattaagtgaccagcaactctaaatattgttttattataattagtaagctaccacaggttctgtgctgctgaataattgatcaataccttacataacatcagcaaaggggtaattttcaattttgcagatggcacaaatctgggtggggggtcaaaatgaagatgagaatttttcatgataggctaaatcacggggtcaaaacccacaaaatagaattgagcagggtttggtaccttcttaattgcttgcttgctttattttcaatggcttgttatgtaacaccaaccatgtggtcaacttgctaggttatataaaggtgaataaggctcggttccttccctcaagaacatattaacatgtagacgcaagtacagaaagggagaactaacattgtattataaatattctaaaaatgctaaattaacagaaatatgatacaaagtatagtataatgtagtatttagaggagataatggtttcacactcctttgctctgacaaagcatcaagagtctttagttatttgtgtcagattttaagaaagccaattaaatgttatagaacacccacagctgagggaagaatttgtactgaagcttggttggagtatactccctgtgtggcttactatgagtggcagtgcagagggtttgtggtggtcaaataggaaatctttatgagtatgaaaaacaaatttctaaggtagactcaatgcaaagtcgaaccacatctggaagaactataaattccataaatgttcattaagcacctcctatgggcaaagtgttctgttaggcctgaatgaatttattgaagacataagaaaaggctcatgtcttggaatatattgtcttttgaggaataccagcataattatgattgtataatagtttaattttatttttgatgtgtactatttaaaattcagagtgctataaaaatagtaaatcagggaatctgtatctggaggaataagaaatgaagtctttttgaaggaagtgatatttagatggaagtctgggtactagcttgttgtggagaaggaagagggtaaaggcatgagggaggaaaatacaggtggggatggaaaggtgttctaagcagggagaagtcagtgcttgtgtattagtccgttttcatgctgctgataaagagatacctgagattgggtaatttatacagcaaaaagggtttaatagacttgcaattctatgtggatggggaagcctcacaatcatggtggaaggcaaggaggagtaagtcacattttacaggaatgacagagggcaaagaaagcttgtgcagggaaactccacttacaaagccatcagatctcgtgagactttcactaccacaagaacagcatgggaaagacctgtccccatgattcaattacctcccacagggatcctctgacaacatgtgggaattcaagatgagatttgggtggggactcagccaaaccatatcattccacccccggcccctcccaaatctcatatcctcacatttgaaaaccaatcttgccttcccaacagtgcaccaaagtctttactcattccctcattaactcaaaactccacagtccaaagtgtcatcctagataaggcaatttccttctgcctgtgagcctataaaatcaaaagcagattagttacttcctagatacagtggggttacaggcattgggtaaatatagcccttccaaataggagaaattgtccaaaacaaaggggcttcagggcacatgcaagtctgaaatccagcagggctgtcaaatcttaaagctccaaaatgatctcctttgactgcgtatctcacatccaggtcatgctgatgcaagagaggggttcacgtggtcttgggccactctgcccctgcggcttttcagggtacagcctccctcctggatgctttcatgagctggcattgattgtggctttcctcggtgtgtgttgcaagctgccagtggatctaccattctggggtctggaggacagtggccctcttttcatggctctaatagacagtgctctagtagggtctctgtgtgagggctctaaccccacatttttcttttgcactgccctagcagaggttctccatgagggccctgcccctacagcaaacttctacctgggcatccaggtttttccatacatcctctgaaatctaggcagaggttcccaaaccgcagttcttgacttctgtgcacctgcgggctcaacacgacgtggaagctgccaaggcttgggcttccgccctctgaagtaacagcccaagctgtacctcggccccttttagtcacagctggagtggctgggacacagggcaccaagtctctaggctgcacaccacagagggaccctgggcctagcccacaaaaccattttttcctcctaaactccagacatgtgatgggaggggctgccacaaaggtctctgacgtgccctggagacatttttctcattgtcttggtgattaacattcagttccttgttacttatacaaatttctgcagtgggcgtgaatttcttctcagaaagtgtgattttcttttttatcacattgtcaggctgtaatttttccaaacttttatgctctgtttcccttttaaaactgaatgccttaacaggacccaagtcacctcacgaatgctttgctgcttagaagtttctcccaccagataacgctaaatcacccctctcaagctcaaagttccctataactctagggcaggagcaaaatgctcccagtctctttgctaaaatataatgagtcacttttgttcgggctcccaacaagttgctcatctctatctgagaccatctcagcttggatttcattctctacatcattatcagcatcttggtcaaagctattcaagtctctaggaagtcccaaactttcccacattttcctgtcttctgagctctcaaactgttgcaacctctgcctgttacccagttccaaagttgcttccacattttcacgtgtcttttcagcagcaccccactctactggtaccaattcactgtattaatttgtttttatactgctgataaagtcatgccagagaatggataatttatacaggaaaaagagtttaatggacttagagttccacgtagctagggaagcttcacaatcatgctggaaggcaaggaagagcaagtcacgtcttacatggatggcagcagacagagagcttgtgtggggaaactcccccttacaaagccatcagattttgtgaaacttattcactatcatgagaacagcacgggaaatacctgaccccatgatccagttacctcccactgggtccttcctacaacatgtgggaattcatgatgatatttgggtgagggcacagccaaaccatatcagtaggtataagtaaaataggtgaagggtggagatcaatcagaggaaagcacaccaaataggaggacaagttctcaatccactgcaaggatttgatttgtagtttggctttcaggcctttaactgtcttcagcttggaagtggggtttcactgggtacccacccctatctgcctaggagtttggctctgcttcctgtcactgtcatatgcacttctctgtggtttccaaaacctgacacagggaagaaatacaatacaggtatctgatttatagcaatctgttataaattattgaatgaatatcatattttaaattcatacctgatagatattttgcacatttcttgatttacttctaaaataagtggatttctcttctttccaaatgtaaatcaaatttcgcctaacttcatatgaaacacgggaagtttttctcccttttgtcagaatttttaaatgtatttatattttaatctgaagaaactagctttctcaaggatggatagagtttgaaaatgatagacatgattcagttttctaactctaatgctatgctagttttcatagagtttatgattaacataaatgtagcaatatacatgattttccgttagggaaaaatctctgtttattcttaatgttgtaaatcacaagtcaataaacacttatgagtgtcttctatatatgtagaaatgtactaggtttcatgggtaaaagtgacaaataaggcaaggcgtctgttttttcatccaatggaaatggctcacaatcacatttcaaaaaagatcagtgaactgtatataactacctatgtcttaatatgaacaaattgtgattcattggttcatataacagctgcaattcctaatacctaacatcaaatcttttttgctatgtgtggtgttagccacataaattctcactattgattcaataatgagttttttggcttttaattgtgtgtcatttttttgttgtttacagacatgataattttacgtagttctgccttggtgtctacctcaattatcagagtcttaaagagattatagcaactgggaaccctaaaagccttcagcaaatcttggctttagccaggatcctcaaataatgtccaaacgtgttaagaacttgaaatattgaacatttccacttcatttccattcattctttccatttccttaggaaaattctaataagaaatgtaattcttaggagcagagagcaggggaagaaaacaggataatttataaactgtttaataaccttgtgagcaattgaatgttgaccatataaattctggataatatcattattgtactcaggttggctgttaaaaagtcataaaggaaagaattttaggcatctatttctagataactattaaaatggtgatcttatcattgcataccatttagctggggagacagaattgtatttaatgaaatgactcatttgttgtattggattcctgccaaattatttcatggtttgtcaaatgataatttcacaagtgtcagtgacaagatgttggacattagttttctcttttcctatctgctgagtcacagttctcaagggatggatattatagtgattcaatcacaccttagattttggcttacatttactaatcagtctagtaaatttggtaggggggaaatcgtgccatagcatataaaataatgagttccatttcctccccacattggcttctattttttgggttctgtatgtacctaggacctaatggggcacttgccacgtaggtccccaatgggagaaaaggttctgttaattactccatcacattaaacagtccagttagtacccatagaggtgaggaagaatgtgcttatgttttatgcttcaggcaaagtagctaatcagagagctgtgaacaattgtaaggaagtgacttgctgcctggttctctgcaatgactgatgacacagtctttttacatcacagaatgtgtaaaatttgttcacatgtataagctcttgttactttgagagggcaattctgggataatttggttgccatattatacttagtcaatccctatgtattgataatctgttttaatttgcatgttgatatacttactgacttacctaataccatcatttatggtttgagatatcattcttaatttccctttaataatacatgtaatgcatgggtttacctagccctaagactcatttcaaaatatattttctgaagttctgtagatgtaattattaaaatcacaaactttcaaactggactcataccccagctggctatggtacttaatgaaaattaaactttttgctcctcagttttcttatctgtataacaggattaaatgccccaccctcgcagttttccttttttctttttcttttcttttcttttcttttttttttttttgagacggagtcttgttctgtcacccagtctggagagtgcagtggcatgatcttggctcactgctaccgctgcctcccgggttcaagcaattctcctgcctcagcctccccgagtagctgggactacaggcatccgcaaccacacctggctaattcgtgtatttttagtagaaacggggttttgccatgttggccaggctggtctcgtacttctgtcctcaggtgatctgcctgcctcagcctcccaaagtgctgggattacaggtgtaagccaccacacctggcctacactttttctttaaggataaaagggaaatacgtgtattaccattgtgcttgtcatatagtaagtaccaaataaagagtagcttctaccattattaaaagctatcctggcttttttactattattaaaagttattcaaagcctacatatagaaggcatagctatatgcctttgtgtcacatgaatagtcaacttttctaattttttctgtggctgtgctttgctctcaaagtgtggcctgcatcagagtcatcagggaaggtggtggttaaaacggattcctccccggcatgttggctcacacctgtagtcccagcactttgggaggccaaggcaggcagatcccttcagcccaggagttccagacaagactgagaaacacagcaaaaaatacttaaaaaaaaaattagcgaggtgtggtagtgcaaacctgtagtcctaactattcgggacgctgaggcgggaggatcaggattgcttaaacacaggagtttgatgctacagtgagtgcatgatcatgccactgcactcgagcctggacaacagagtgagatcttgtttcaaatacagtaagtaagtaaataaataaacccagcaaaacacagatccctaggtctcactctcacgcttgattgagtatgtctaaggatgtgggcaagattctgcagccacaactgtctcccaggtgaggctgatggtactcgttctccaactaaagtttgagtagctttgccctggagtagctgtcccaaacaggttaatcctcagaattgcctgggaagatttaaaatatatttcccaaacataactgaatcaaaatttgaggagacattgtaaaaaatccatttgaaaattgttgcgcaaattagaggttctcaaacttgagtgcacatcagaattttctggaggccttgttaaaacagattgttgagatacggaatcaacctaagtgtccattaacagataaatgaatttaaaaatatggcatataaacacaatggaatattattcagccataaaaagaatgaaatcctgtaattggtggtaacatggatgagcctggatactgttaagtgaaataagtcgggcacgaagagataaatatcacaagttttcatatgttagagctaaaaagtttgatttcatagaagcaggcagtagaatagtggttagcagaagccggggagggtaagagggaggagagggaggaaagggacaagctagttaacagatacaaaatgataagctaaataggacggatatgtactagtgttctaaagcactgtaaggtaacttcagttaacagtaatttattgtgcatgtttaaatagctagaagagaggattttgaaacttcccaacacaaagaaatgacaaatatttgaggtaatggatatgataattagcctgatttgattattacatgttatattcatataggaaaatatcactctgtacctcctaaatatgcataattatgtgtcgattaaacattaaaaagaaaacacagatttctgggtctcactccctgagatactaaccaagtaagtctgggagagtcctgaaattcggtatttctaaaaaggtcccaggtgacgctgatgctggtctggatccacactttgagaaccatagcctgccctagaccactgcttcttaactcattttaaaattaaggatctgtgtgagattctgctggatggtgtagattttcttgaaaaataaaaaacgtgaacatagtttccatatactttccagtgttcatggatcccttgaagtatgtctatgattcttgtatgaaagcttgactccagatagaacgtctttgagtaacatatcccaggttaggaatggaattctctggggctatttgcaaatctgtctaaacatgggaatatgccagtaacattttactccattacccagagaacaggaccaagtcatgttattacctgtagaatgataagagactttcaattctaagaattatggcttatttttacaacttgttggaatatgatttgcagatttggtgaaaatggtagttacttccacaaagatgtttaacaatttaaaagttctagaagtttgtgtttcctactggctttattctttatttttactcttcaaatctagctgttcgctgtctttttcctgaaacatttttattaaggaaaatacagaattttgcagcttatcagtttaaacagaaaacatccctgaaaagtcttcgactatatgactacattacttatacaaatcgtgatcatagtgaaactgaattactttgtaaataaccatgattcattactataagcagggttttgaaattatgactacctcgagaaaacttttattaagaataaaaaagcaactatctcagctggaccaataatagaaacaccagtatattcactcgctttttatttctcaaagcacatttgtggcttgtagccaagaattcattgcattgaaggagtgtttgacaagcagtattgaagctgtaaacactttgaactcattacagtgtctcaccataggaacttaactgtcactgaagacaccctgtctgtgaaaccatcattcctacaattatttttacctttgcctgaaaatatgcttttgtgctttaaggtatttcaaaagacaagagaaagatggaagctaaggaggctatagggatttcctgagttctgtgagtgctgtgttgatacagaacaagatcagaaacttggatatatatgtttcaacttaaaatgctgattgatcatcatgacaatagttttatagagcatttgtatgggggtgaatgtttgaagttataaaaagcattgtaatgttactcattcatgggctgaacaaacatttcctctttctctttctctggctttcttgccaattacttttttcttgccaattacttttttcttgccaaaaacaactgagatcacccccttaagtccattttgaaacaaacttagcaaggagtggttgttagtctgcaataacaatctacatctcaaactcacatccttacagttgttgtgtaggtatcatagctgcgtgaaacagtgaagtgtaagattgtgtctacagtggtctggaaaatttgactcataatcacatgtagaatacagtcctttaagaactctcccaccccgcatcactgccctgaagataatgagccaatgatcctgatggtaatctcttctaaaatcatacgtatttgagaaaaattgtatcttttcggagactggtaatagtccagatgaaaagtgtttatatcctgaacctagagtattgacaaagcagatgaagaggattgattgggatggagaagattcattgatgggacttaaggaatgactagatatgacaggatagggaggtgaagtatgctaggatgatctgtatgataatgtcttacacaagtgaacagaagtccagtttaaataacgaggtttggagggagggagtaaagaagatggatttcatttttcttaggtctaatttaatgtgcttttggtaaaatgtctactaggccaccatgtatatgaatctgaaccttaaaaaggaggtttgagcagataggtgcacagtttttaatcattagcatatttaacagttgaaaccatgagagaatatgccttatgagaagaagacaccaagatcacacaatgctaggaagaccaaaaaggttgtggcagagaggtgggagggttgatcatgagaggaataattaagtactaaattccactgaaaacattaagtaagatgtgggttaaaatagtttattagatttggcaaattggaagttttgataatattcaaaagagcaactttggaggaatggcaaaaaaaaaaaaaattgtaagaatggttatccttcctagaagatggttgcagaaatgattcagaaatagcttgtaagtagagggtaactgaaaagccctgagtgtgcttactagctggtgagagagggtttaaagatgaatatgtgttccttaaatccattttgtgtgtttatgaggacagggtaaatagtctagctaaatcaccacaccctgccctgtgcctagcatagtttctatatatttattaggcaccaaatattttaggtatatatttttttatgtaaaatatatagggaactgtgtgaggccctggaagaaacacaatgtctattttcattgaaaaagagctacattggagagactaaccacccatcactcaatactattttatttagttgtataagtaatgggtgctatggcagtttatgacagacagacctgcccttatcttgggggaaccacagaatgctttacagaggaagccatttttaatgttctactgagagcaaaatagaacttcctcccattcctcacccactgaacacattccacagagttaaaaactctgctttccttccacggtcacttttcttggcattcagaaattattggaaactgtaactatgggttcagtgccaacaacattctaacactcatggttagaatcctaaccagaaagagtacaaataagggtcctttcttttttgattttggctcagatatcgatgttactaataatgataataaaataatagtttaaatttaccctgtctttatgattttcagaatacttcccccttctagtttatttgggatgagatgctagggaatatgagtaggaaaatgataaagtgagacaaagaaggaaggaaagtcaatgaagactacatttcaagagtttaaactgtggtggacaactggcgctcaatttgactggggacttgaagaaaattatgtggaacacacacctcagacttatcctttgaagagatgagaatgctaaggtatttatacaccaactcctgctggtcatctgttggcagatcccgggaggggctgtgcattcactccctagcatttttgatctattgcatgcactccggaagaacagactccagtaggcaaagagatgcaggagctggcaggtggaagttggaacaatgtccactgaaatgcgaaggactcagaggaagagacagggtatcatcagcaccagcctaatggggtttgaatctccattttgccatttactagcagtgtgatctctggcaacttacttatcctctcttggccttcgtttcttcatctgtaaaatggggatcataatagtatctacatcgtaggattgcagtgaggattaaataaattattcatgtaacaattttacagaagagaacatgaaaatttcgaaaagattacttacttgtcaaatatcacacatatgggaagcaggccaaagccttgattcttggccccagcctttttccttatacctactgcccaatgtctgtgttgccttgtatcttcataatttacttcccattttctcattgcttaggtctcattcctgattcttttgtcccatttactctcctctaaacccttgtgattgtccagatgagctttagcttgggtgtctgtgtatcccttctgaatatttcatgcttcggccttgcccagcagcttaaacttacactattaactcccggtcttctctacctcgcatttttcctcttacctatgaggcatcttgacctataatattttcacttccaccagctgagtctatctgtggcacatgattacttgtctgattccttgttctcatggaatccttaggcttctctgatgtattttatcctattggcattcacatcccagtgggcacgaagaatatttaataaaaacattggctttattttagaacggaataaacacatcattctttcctcctaaaaataaaagacatattagttggattgtgtcattactgtagagtgatacaagccagaagatgcagtgacaatatcagaatggtgtgttatctgttaccaaagggaatgggtggtagctgtgtaaccaggtcatcatagtggcatgaccatagccaagtgtacggcaccatagtcaagggcactgaacaggtcattagttgggattgagtcaagagttggaccatttgacatggaacacacattctaaaaatatattaagttggtgcaaaagtaatcacggtttttgccattactttcaatggcaagaaaatgcaattactgttgcaccaatctaatagtaacataaacatcaagcggcttcaacttttgcctaacaagtttatttaaaaggttctaggctagtcatgtttaaaatggaacagctttattgagatataatttatatgccatacaatcatctgtttaaagtatacaactcaatgtttttagtatattcacaggactatgcaaccaaatattgtgttggtattataccaattagagatatgacaaaagctttggaccctctcatgcacatttgtacaaacacaaaagaatttgcatatgataccagaaaattcatggacttctctgaagtccatttatatgcccagaagtactactcgttcagccaaactctatcttaaggcagctattaattctgtttgtacaatccagcagacagataaggttgttgatcgtcttatggactcatggatatcaccttaacgacaacaatatatgtgccaagtctggctcctaaagttttaggattttgtgtttaaaaagggggagaaaagctttagtatgtttcgaatcctaactgacagtgagtgacaaaggtttgaaaaaatatattgcagatgtgtgaacatctggaggctaattgtacatgtttaggtactccataatctcatgaaaacttttgacctagaaatgtcagcgctgttgccctctcaaagagtcatgattctttatcacatcgctttattgtaaaatggaagtacatttagtggcaatatccgtgtgattagctatgtccagtcatcagatttttcttgcgttattatgattattacagattctattacactatgacattgagcataaatcaccagcctccttctcggcacatacaagagtcacttattttctaaaggttaccaaatatactaacttgtttaaacaaacgtacacacacaccttcctatatctgggtaggtacagactcagataaatcttcatacaacagcatgctataatgaaaagaacttaagttttagagtcataaataacttgatttgaatccatgagtatatatttacttactgtataatctagggcatgttatgtaaacacttgagaattcaatgccaaccttgggataacaaattttacccagcaagtctatgagaaagatcatagaaataacgcatgggaagtacttaaaacagtgtcctacacatggatacagatcaagaggtagtaaatacactcacaaaatggtctaattaagaaagtcttccatgagtttatgccctccaaaagatgagattcgaggccaattttgtgtcataaactttatgcttttataatattcatttctattttatgattatataatgcttaaataataatatagtaaatattcatgtaaaattcttacaccgaaagataaatattgttaatatgttggtggtcattaacttctccttctctctgttctttctcctctcttatttatgtgacaatatatgatccttttttctgaggtttaatagtgattcccatgttttcctcttccatagataccataaatctgttgatacacatgttctctttaccatgaaatagatcccttctctgtaccatggcccctataaatcaggatacactacattatgcatctataagaataattctgatatctcagcgactcaaaagaatagaattttcttcccgccaaacttcatgtcactatagattggtaggcgtctcaactcattgtactcagctgaaggacctgggctgagagaagggtcatctcaatataaactttaagaacgcaagagaacatgtgaaagcacacgataacccgtaaagcttctgcttggaaatggcgcacatcacttctgttcacatttaatttgatgaagtaagtcacatggccatatcaaagtacaagtaggcagagtaaaagatactatcaggagcctggaataaaagaatggaactttggtgaatagacttaatggcaaccacatcccttaaaacaagggttctcaaacttgaacatgcatcagaataacctagaggtttgttaaaacagggagtgttgggatccaccccctgagtttctcatcctgtaggtctagagtacagccagagcggttgcacttctcacaaattcccagttgctgttgattctgatgtctgagaaccacactatgagaactgctgccctaaagtataaaagctcttctcttaagattccacaatggaaaacacttcaacagtggtactttcgactgtccatggtcacatttcaaccacatacttctcaagtttccaaatttatctcaatctccaaccactggtctgttaataatttcccaaaattgctgtattatttcttttcctctggtggaatttaattaaaatatctttcctacaaaccttttccaaatcattctaactagaagtattgcctataccttttccatagtagtatacacctttccaaagtgatcacatgctttgtattatggtaatcttacacttgtgtttttctcagtttcatgaactgttttcaagcgcactcatagaaatttacccaaaatgaatactaaaacacttaattttttattcctgattttgccacattagggtaaaagacttggccacatgttctaaatttaaatcactactcttgtctcagaagccatgtgaacagtagggaggacagcataggttctggagctggactgcctgggtcaaaactaaccttgccactttttagctgtgtaaacttgtgcaaatttcttaagatccctgagccttttcctcatctagaaaatgaaagtgagaattgtattcataccataggactgttacaagaattaaatgaattagttgatttgaaacatttagtgcaggacttggcaagttttgagccattataaccattataattgcaaaacatcctgaagttattctctatgcctgaagttacattttcttaatatccattttctccttaatcccttaaaagctgtcttctgcctcatttattctatcaaaactgtattctcaacagtcactaattatattctaattgaatttcagagtgaatttcacacctctccttttgaaagattcatttctatgaatttgggacagcttcctagtatgatattccatctataagtatatccatatcatctatatcgtataccttatctgctctgctaactctttccttgtgttattatggatgttctccaattctgttctgcagacgggtgacaagtgaacatgtagaagaagttttcagtctcctagttttacctccattcaattaactttaaaatctacattactagttctgctgtgtcaccggcagtccaagaaaagaaacctgatcagtttgtgaaaatagctaatatttaatatgagcttattatgtgccagctactttacctggagtttcttatttaagccttacaattgctttattaagggctaggaacttcacatgtacattaaaatgtagaagcaaactgttgaggagagaaaggaatttacccatattatacagataactaataggaagtagagattggatttgaatgaatccaggactgatgtcgaagcccagtgtcttaatgttattttgggatgtctgcatagatttttttttctttataagggagtgatgattttaaaagcaacaagacccaccttaggtaaagtccatcatccaaaaccaaactcagttttattcctgtgcctacgcaaccacattattggatgcctagaaaatgttcaaacttctaaccaagtcactggtaaccctctgtgattttggcttaatcaggtttattcatcagttttgcccatatttcacttgagctctagtctcattaccttaattacagcttcctgtatgtctataggcttttgcttctatagacccaatttatatggtatcaactctatatgaagccgtttttgaatctcctagtaatgctttaattttcctaaaattcctgttatatcaaatcagatttcttttttatttttttgtcagttataagtttattttttgtgagggcaaaaataaatttgttggataatgagtttgtgagtagtagatcaatttgttcacatattttgcaaaagttagagcttattactcattcatgtactattgatgtaacgcattagaagacagttaacattagttcctaattgcacctgaccaaaaggagctgtgggcctggcctatacaccttattgcgtgttcagcatcaactgatttagtgaagcagcaaaaagaaaaatggtgtgtgcagtattatctttctgccacagatacatgtttttaatttccaagtttccaatgcatcattcagttttatctaatgggaatgcagctgagagaagtttgtatcaacccaaaactacatgctaatatagtttagttttcaagacttgtggagtctttttttttaatggaataagatcatcagaaatcctggagcaagacagactggctgtggtctaccagcattgtagtaaaaacattggggaagttttataagacctaattattagaaaataccataaaatagtcattttcatagaaaaagctttcctttctttcctcacactaaatcacattactttgtgttcaaggtaaaatggagtttgaaatctggatgtaaataagaaaagatattattttattccaagtgaaacatgtattcacacttcacgtcttgaagcaccaggtggccatttgggctgagttttcaagaaaaaaaaaattatatagattttatgtccccccccttttgttgttgctgttggtggtggtggtggtgatttttattttttggtaaagataataacatatgaaacaattttcctgttaattaaaacttactctatttatgagcatgatattttaaagaaattttttatatataatgaatatttggatatatatgtggttaatggttattttaacaaacattttggtttgctgaaatttttaagtttttttttcttttattattatactttaagctttagggtacatgtgcacattgtgcaggttagttacatacgtatacatgtgccatgctggtgcgctgcacccactaactcgtcatctagcattagataaatctcccagtgctatccctaccccctccccccaccccaccacagtccccagagtgtggtgttccccttcctgtgtccatgtgttctcattgttcaattcccacctatgagtgagaatatgtggtgtttggttttttgttcttgcgatagtttactgagaatgatgatttccaatttcatccatgtccctacaaaggacatgaactcatcattttttatggccgcatagcattccatggtgtatatgtgccacattttcttaatccactctatcattgttggacatttgggttggttccaagtctttgctatcgtgaataatgccgcaataaacatacgtgtgcatgtgtctttatagcagcatgatttatagtcctatgggtatatacccagtaacgggatggctgggtcaaatgcgatttctagttctagatccctgaggaatggccacactgacttccacaatggttgaactagtttacagtcccaccaacagtgaaaaagtgttcctatttctccacatcctctccagcacctgttgtttcctgactttttaatgatcgccattctaactggtgtgagatggtatctcattgtggttttgatttgcatttctctgatgcccagtgatgatgagcattttttcatgtgtcttttggctgcataaatgtcttcttttgagaattgtctgttcatgtccttcgcccactttttgatggggttgtttgttttttcttgtaaatttgtttgagttcattgtagattctggatattagccctttgtcagatgagtaggttgcaaaaattttctcccattttgtaggttgcctgttcactctgatggtagtttcttttgttgtgcagaagctctttagtttaacgagatcccatttgtcagttctggcttttgttgccattgcttttggtgttttagacatgaagtccttgcccatgcctatgtcctgaatggtaatgcctaggttttcttccagggtttttatggttttaggtctaacgtttaagtttttaatccatgttgaattgatttttgtataaggtgtgaggaagggatccagtttcagctttctacatatggctagccagttttcctagcaccatttattaaatagggaatcctttccccattgcttgtttttctcaggtttgtcaaagatcagatagtggtagatatgcggcgttatttctgagggctctgttctgttccattgatctatatctctgttttggtaccagtaccatgctgttttggttactgcagccttgtagtatagtttgaagtcaggtagtgtgatgcctccagctttgttcttttggcttaggagtgacttggtgatgcgggctcttttttggttccatatcaactttaaagtagttttttccaattctgtgaagaaaggcattggtagcttgatggggatgacattgaatctgtaaattaccttgggcagtatggccattttcacgatattgattcttcctacccatgagcatggaatgttcttccatttgtttgtatcctcttttatttcattgagcagtggtttgtagttctcctcgaagaggtccttcacatcccttgtaagttggattcctaggtattttattctctttgaagcaattgtgaatgggagttcactcatgatttggctctctgcttgtctgttgttggtgtataagaatgcttgtgatttttgtacattgattttgtatcctgagactttgctgaagttccctatcagcttaaggagattttaggctgagacagtggggttttctagatatacaatcatgtcatctgcaaacagggtcaatttgactttctcttttcctaattgaataccctttatttccttctcctgcctaattgccctggccagaacttccaacactatgttgaataggagtggtgagagagggcatccctgtcttgtgccagttttcaaagggaatgcttccagtttttgcccattcagtatgatattggctgtgggtttgtcatagatagctcttattattttgaaatatgtcccgtcaatacctaatttactgagagtttttagcatgaagggttgttgaattttgtcaaaggccttttctgcatctatggagataatcatgtggtttttgtctttggctctgtttatatgctggattacatttattgatttgtgtatattgaaccagccttgcatcccagggatgaagcccacttgatcatggtggataagctttttgatgtgctgctggattcgttttgccagtattttattgaggatttttgcatcagtgttcatcaaggatattggtctaaaattctcttttttggttgtgtctctgccaggctttcgtatcaggatgatgctggcctcataaaatgagttagggaggattccctctttttctattgattggaatagtttcagaaggaatggtaccagttcctccttgtacctctggtcgaattcggctgtgaatccatctggtcctggactctttttggttggtaagctattgattattgccacaatttcagatcctgttattggtctattcagagattcaacttcttcctggtttagtcttgggagagtgtatgtgtgcaggaatttatccatttcttctagattttctagtttatttgcgtagaggtgtttgtagtattctctgatggtagtttgtatttctgtgggatcagtggtgatatcccctttatcattttttattgcatctatttgattcttctctctttttttctttattagtcttgctagcagtctatctattttgttgatcctttcaaaaaaccagctcctggattcattaattttttgaagggttttttgtgtctctatttccttcagttctgctctgattttagttatttcttgtcttctgctagcttttgaatgtgtttgctcttgcttttctagttcttttaattgtgatgttagggtgtcaattttggatctttcctgctttctcttgtgggcatttagtgctataaatttccctctacacactgctttgaatgtgtcccagagattctggtatgttgtgtctttgttctcattggtttcaaagaacatctttatttctgccttcatttcattatgcaccccgtagtcattcaggaggaggttgttcagtttccatgtagttgagcggttttgagtgagattcttaattctgagttctagtttgattgcactgtggtctgagagatagtttgttataatttctgttcttctacatttgctgaggagagctttacttccaagtatgtggtcagttgtggaataggtgtggtgtggtgctgaaaagaatgtatattctgttgatttggggtggagagttctgtagatgtctattaggtccacttggtgcagagctgagttcaattcctgggtatccttgttggctttctgtctcgttgatctgtctaatgttgacagtggggtgttaaagtctcccattattaatgtgtgggagtctaagtctctttgtaggtcactcaggacttgctttatgaatctgggtgctcctttgttgggtgcatatatatttaggatagttagctcttcctgttgaattgattcctttaccattatgtaatggccttctttgtctcttttgatctttgttggtttaaagtctgttttatcagagactaggattgcaacccctgcctttttttgttttccatttgcttggtagatcttcctccatccttttattttgagcctatgtgtgtctctgcacatgagatgggtttcctgaatacagctcactgatgggtcttgactctttatccaagttgccagtctgtgtcttttagttggagcatttagcccatttacatttaaggttaatattgttatgtgtgaatttgatcctgtcattatgatgttagctggtgattttgctcgttagttgatgcagtttcttcctagtctcaatggtctttacattttggcatgattttgcagcggctggtaccggttgttcctttccatgtttagcgcttccttcaggagctcttttagggcaggcctggtggtgacaaaatctctcagcatttgcttgtctgtagagtattttatttctcctttacttatgaagcttagtttgcctggatgtgaaattctgggttgaaaattcttttctttaagaatgttgaatattggcccccactctcttctggcttgtagggtgtctgccgagagatccgctgttagtgtgatgggcttccctttgagggtaacccgacctttctctctggctgcccttaacactttttccttcatttcaactttggtgaatctgacaattatgtgtcttggagttgctcttctcgaggagtatctttgtggcattctctgtatttcctgaatctgaatgttggcctgccttgctagattggggaagttctcctggataatatcctgcagagtgttttccaaattggttccattctccccatcactttcaggtacaccaatcagacgtagatttggtcttttcacatagtcccatatttcttggaggctttgctcatttctttttattctttttcctctaaacttcccttctcggttcatttcattaatttcatcttccatcactgataccctttcttccagttgatcgcatcggctcctgaggcttctgcattcttcacgtacttctctagccttggttttcagctccatcagctcctttaagcacttctctgtaatggttattctacttatacattcttctaaatgtttttcaaagttttcaacttctttgcctttggtttgaatgtcctcccgtagctcagagtaatttgatcgtctgaagccttcttctctcagctcgtcaaagtcatcctctctccagctttgttccgttgctagtgaggaactgtgttcctttggaggaggagaggtgctctgctttttagagtttccagtttttctgctctgtttcttccccatctttgtggttttatctacttttggactttgatgatggtgacgtccagatgggttttttgtgtggatgtcctttctgtttgttagttttccttctaacagacaggaccctcagctgcaggtctgttggagtaccctgccgtgtgaggtgtcagtatgccccttttggggagtgcctcccagttagggtgctcgggggtcaggggtcaggcacccacttgaggaggcagtctgccccttctcagatctccagctgcgtactgggagaaccactgctctcttcaaagctgtcagacagggatatttaaatctgcagaggttactgctgtctttttgtttgtctgtgccctgccctcagaggtggagcctacagaggcaggcaggcctccttgagttgtggtgggctccacccagttcaagcttcccagctgctttgtttacctaatcaagcctaggcaatggcgggtgcccctcccccagccttgctgccaccttgcagtttgatctcagactgctgtgctagcaatcagcgagattccgttggggtaggaccctccgagccagatgcaggatataatctcctggtgtgccgttttttaagcccgtcggaaacacgcagtattcgggtgggtgtgacccgattttccaggtgctgtccgtcacccctttctttgactaggaaagggaactccctgaccccttgcacttcccgagtgaggcaatgcctcaccctgcttcgggtcgcgcacggtgcacgcacccactgagctgcgcccactgtctggcactccctagtgagatgaacctggtacctcagatggaaatgcagaaatcacccgtcttctgcgtcgctcactctgggagctgtagaccggagctgttcctattcggccatcttggctcctcctctcaaatcagatttctgatccaatatttcaagttttaattttcccactggtaggctctattcctactctttttctgctcatggctgaaaattttctgtatctcccatctctttcatatttgaatctattgaatacatagcctccacactcttaataaaatactaatttcatcatgtaacttcattattcaaaatatttagtggctcccactacctatattaaagattccaaactcagtagttactaatatttttcataggctttctagtcctgtcctttcttttagtcttatctcttactactttaagcttattcctagggcaaacatcttactatttccaaaatgtgattcaacgtcattcctattgcctaggaagacactcttctgtcctatggctctctaagtctacttcctgttgaagtactctttttcataaacattcaaattgtttttgtgtcctactttggtgttacctgacatattttaaaactcatggattggatcacatatctatgcatttacttatggcaccattacattttatttattttaagagacaagatattactcttttgcccaggctggagtgcactagcacagtcgtagcttaccacaggcctccaactcctgagtcaagtgatccttctagctcagcctcctgagtaactagaattgcaggtgtacaacacaatgcagaggtacatttaaacaattttttattgttattttgtagagacagggtcttgcttcattgccccggttggtctcaaactcctggcctcaagcgatcctcctgcctcagcctccgaaaatgctgagattaggaatgtgaaccattgtgcctggcccacgttacattttaacagtggggatctgaacactgcagtttcccaaagccaaaaacatgactaactcagctataaatatttaaccaactcttaagtatacctcctggaccatggtcatatagagcagaggctgtgctactatatatgctttagttttgctagtacatttagaaaattgtttattacatagtcagtactatggtgaatggttaagatatgttgaatgccctgctgagacaacgtttttactttgataggaaagtcaaaagaataacacacatatttaattattaaagaaccagaacatgtagttttctgaatttcttagtataaaaagctccttaagagacataagtatacaaatatacacttcttcatctatgatactctattaaatttggcatatttctttttaacaaaaacttacaagggtagaaatctgctgagatgatatatgaaatgtggaaatgttaaagatagattgggggggtggttaagataagacattgaagcatataatactcctcttggagaatcattcagcttgccaagctaccatgaatcagtgtttgaaaagaggcagaagatacatacatagaaaaatcagccaaaatattcattaacatgaaatgtttccaaagctgaagtgctacattaatggttgactttgtgcctcaagactaaatattgggcaatgttagctttccctataataaaacttgccccaaaatatatgttgagtatcccttatccaaaatgcttgggaccagaagtgttttggattttggatattttcagtttggaatatctttattatacatacgagttgagcatccataatctgaaaatctgaaatccgaaatgattcaataaggatttcccttaaaaatgatcgtgtagttactcaaaaaattacagattttgtagcatttcagatttcaaattttcctattagggatgttcaacctgtattgaacttacttgcttacacgtgttgcccgtttgctgtactgtaagctctgtgaaaaaagtatctgctgacttctttgttcataattgcgccctagcaccttttgtggtagttggaaaatggtagacactgagtaaatatttactaaatgagtggataggtaaaagtatttcagtttggcatggcaagatggaaagactaacagtgtttaagtggctatggccaacgtcaggccttcttcagtttaagaactgtggaaagaagaaaattaaacaattaaggaaagataagaataaatccaacaggaagttctcactgaagccaagagattcaaaaaaatacaggaagaagaagaggaagaaaatactattttctatgcattatattcccaaagatatctgccttactgattaatatcaattaataccataactatcacattttctcataggccaaggtgaaatgtctgataagacaagctttgttgctaacacaatttaactcactttagaatattaacatgacatttatgtggtctactcctctctaagctcaaataaagcagctgcgtataaaaagcagccatggattaaatgacttcagcctgctttgtggaaactactgctgttaaacctgctcttgataaactacaaagagtgcctggactccatttatgaaaagacatttgaatatagacctcacatggtgatcatttaaaaatattatattttgcctgtattacaacattgggttgtatttttgtttaaatctctacttcatttacttatgcgtgtaatactgacttgcttcacaaaatgttactctggagtgtctggcaagcttcctaacaagaaatttgaaagcagttttacatgaaaatcacatttttgaattttatatttctagacaagttttagtacaagcagtgtaagagcataagagtagtctatgtcatatgctatttgtcagtctccaatgaagagtaaacatttatcagcttcagtaacaatccctgcctaactgaggagtgtcattttctgaaaatattgattgatagaggccttgcctaaaaaatataaaatgcatgtaatttacacacagctgagaaatacaagctcattttttcctgacaagcagtaatgccctttataaactatggagattaaattacaaaaaaagttaaattaaaaacaaaagtatgatcagagtgatcagagttttgtgtggtacattttctagtaatcatgttttacagcagtctaatttggtaaataaaagtgaattggaatatattttaaaggctaatatgtatatgtgtgtatgtgtatgtatatacatgtatatgtgtgtatatatacatcatagaaacctttatatttaagagaaaatcatcaacaaatacttttaacacatttgttgttatgacgcagtaacatgtatcctaaattaggaaagtcatgtttccggatattttcctaaggaaatattggttctaaaaattcagcataggaacgtcaagtattttattattcactgaagggaccaataatatcaatgcaagcagaggcctgatatagaaaaattaattaaggtgattatagaggtgtaagcaggactctagtaaatgaatttagaaggtggtctagtcagttgcttgaacattaatcagaatttagagttctgctctgttataaactcaatggtctcgtgaaaccatttttatacaagtctcaatgaattcatctctatatagttcttgttccacctactttagtattttttgaggagcaaatgagataatgtgtgcgaacataagacacaatgtgtaatctaagccaatctgggcagattaccttctctagtgcagattagagatatctatgcattcactaactgaatttttgtaccagttggaagtgtttctgaagcagatcttttttttgctagtctattataattattaaagatgatatcatgcctaaaatttgtcacattaaagaagcatcagtatctttgtaacattcacacattgattttacttcaacctagaggaaccatgactgcctttaaccatttgaaaaggtctttatgaatctaccatctccaagatgaatacccacagcctttattattgggctcacttttggtgtcctttatcgtcatggtagtcatagctcctacatctagtaaacgttaggcctagaatttgaattgccttgattctcaaataatatctgaatccatcatcttatatatttataatttctttgaatatgtgataattaattcagggtaattagcacatccaatgtctgtgtgtagaaacattgtgttggaccccataaatatgtataattatcatgtcagtcataaataataaaaaaaacttcccacaaataatttataaacccatgcagtccttataactgctctttccaatattaatttcagacttaaaggtgatctgttaaattttatcttactggtttcgatattattatagctaagacatccatagctgaattttattacaaagagtaaaagctaccctttccaggagagtaaaatattttattataatagctgtatttttatgccttaagatccaagatcattggcaaggtatatttggtggaagcagtccaaatgagagtcacatgaccatcaagtagatataactttaaactgacacaaggccatttgccatcactttttggatagggtgtgctgccacatgtgtgtttttaaaatactatattttagtacagattcaaaattttgtctgtgaatttattatgggagacattgataagctacattgtgaatatgaccttatctatcgaactaataatatgatcaaaagagaaaatgacatttgttcatgggttgatttgctaaccccgcagtgtcataaatagtttatagtagtgtcattgcctccatagaaagttaagattgcgtagattcttcagctgtaataaatttgtaacatatatattggataaaagtatatgagaatgttcaaaacattatttagattaagagatatacctattagaaattgcatatattccaggggaattttttaaatttttgtgggtacatagtttgtatgtgtatatatgtatagaaagagagagacagtacatgagatactttgataaaggcatgcagtaaataataatcacatggagaatggggtatccatccactcaagcatttatcctttgtgttataaacaatccaatgatactgagttattataaaatgtacagttaaattattgagtatagtcaccttgctgtgctcgcaaatactatgttttattctttctaaggaatttttgtacccattaaccaaccccagcttacctccaccccctagtaccctactcagcctttgagttgagatctctctctctctttagctctaataatatttgctttatttatctgggtgctccagtgttgggtgcctaaatatttgcaattgttgtatccttttgctgaattgacccctttctcattatataatgaccttttttgactctttgtttttgtcttgaaatctgttctgtctgaaaaaagtacagccactcctgctgttttttggtttccattggcatggaatatcttttttcatccattttcagcccatgtgtatctttataggcggtcattaaagatgtcaagtattttgtagaatcatagcatgtatataaacacatgcatgcatatacatatatatacctatggactacaatattatagataaaatttcataagtgactatgatccatgatatgagaggcagagaatgctcagcagtgggatccctctctcaagccatactgtcaaatctagtatattgaaatttctggaacacccttatatattagagtctttaccagaaatgctggtacgtttattttaactgttattgcagaaatggctaagaaaacaatgtctagattctaaagcaaggattaggattgtatactttcttctgttgtgttacacagatacaaccaaacaatgactatttattaagtactatctgtggctaaggtgttgtacttgaggctgtgttatttacgcactaagctgttaaagtttatttgatgtttactagagctttctgatgccaagaacacaactctggttttggtagctctcttttttccattgtttaaaaatgctaaagatcatgcaaataattaacatatgataaacattttttaatctcagtaacattgtaaatttataatatgatgagaaaaagagctgaaagattactgatgtaatttataacaggttagtatttttagttcatcattataaacccagaagagaagagctaataaagttattcagttgtgcttatgtaaatcttttggatcttgagacttatttaatgactggatgaagattttaagtgccatgggatatgtgagctacatggttcaactgtacaattggatcactgttcattttatgggctgtgatatacttcacattgggttgatttattgtttcagagtaaaattagctttaacatgttttcttcctaactgaattgtaaatcaattatgttaacagctcctcttggtaagggcctagacaaaatacatatggtcaataaccattttgtgtgaaataagcatataaaaagcagactttagtagactactctagatttgcatagttcctcataaatcaactttatgaaaatgataagaactgaacagaaatttatttgaagaatttgagccataacagccttataaattaggttcacttcacctattttattcacctcgtttagtttcagcaaaaaagtctgatttaatttagagtttattattacttttgattttaaatgcacaattcttaattgtatatttatacattccagttggaccaattttttgaaaggatttcctcaagaagtagaattgcaccatttaaatgtattatatttgacttgtcaactgtcgaatctaattgtcatcatttgaaatacaacaatatgtgctaattattttagttttagtttttattcttttactggatgtacttaaggcaaccttgtccaactcacagcccatgggctacatgtggcccaggacagctttgaatgcagcctaactgtaattcacccactttcttaaaacattatgagatttttttgcaggtttttttttttagttgattagctattgttagtgttagtgtattttaggtgtggcctaagataattattcttcaaatggagcctaaggaagccaaaagattacatacccctgatttaaggggtacaagatgttacgatatacatagacataatgaaatgattactgaattcaaccaaattatcctatccattatcttccataataactgttttggtatggtaagaatacctaaagtctcttttcttagctaatgttcagtgtacaatacaatgccattaactgtagtcatcatactaagcagttatcgagatttatttatccaatataacttcaagtttgtgtcctttgacctacttctcctcatttcttccaaacatttaaagagtaatttataccatttgttcttaaaatcttctaaataatagaagaggaaatacctccaaagccatttatgacttcagcatcaccctaaatacgaaagtcaaacagacaccgcaagagaagaaaatatatatatgccaatatctaggaggaatatagatgtgaaagtcctcaataaagtattagcaagacaaataacacattggattataaaccgtgaccaggtgggtttagccctaggacacaaggttggtttaacatacacaaatcaatcaatgcgacatactacattaacagaaagatgaaaaaccacatgattatctcaatacatgcagaaaaagcatttgataaagctaaacatccttttattattataactcttcgcaaaatatgtatggaaggaaatttcctcaacatcaaggctatttatgaaaagcctatagctaatatgatcaacggtggttgtggggtggttgtactgaaagctttccccttaagatttgctaaaaagcaaggatgcccactcttaccacttccatttgtcatagtaccaaaaatactagcaggagcagtgagacaaaattaataaaaggctttcacatctgaaaggaagaagtaatattatttctgtttgcaaatggtatgatcgtatatgtagaaacccctaaggactccacaagaaaaatgttagaactaataaatgagttcagtaagtagtggaatacaaaatcaacataaaattagttgcatttttatgcaaaagatatccaaaaaattttaaaaaattctatttatgataacatagaataaaatatttaagacccaatttaaagaagaaagtgaaaaatacgtacaaccaaaactataaaacattgaggaacaaattaaaaggtaaatatatgggaaaatatcccatgtttgtagactggaagaagtaatattgttaaaatttccatactacccaaatggatatatagctgtcccttggtatccacgggacatgggttccaggatgccagtggataccaaaatccaaagatgcttaaatcccttatacaaaatggcatagtatttgcatatacctatgcacacccccctatatactttaaaacatctatcgattatttgttattacacctaatacaatgtaaatgctatagaaatagttgttaccatatattatttttacttgtattaatattttttgttgttgtattgagttttttgttctatttttgattatttctggtctacagttgcatccgtggaaatagaaggttgactgtacaaatttaatgtaatccctgtgaaaatctaaatggcattttttttcacagaaataaaagagcattataaaacttacatgaaatcccaaatagccagaacaatcttgaggaaaaaaaagttggaaatactgctctttggatttgaaattatatcataaatctacagtattaaaaagagtattgtaatgccataaaaacagacacataaactgatggaacagaatagagatctcacaaataaacctaagcctatataatcaactaattttggacaggaccaccaagaagatatgtggggaaaggacagtctcttcaataaatggtgttgtaaattgtacccttgtcttatactgtacacaaaaattaagtgaaaatggactaaagacttaaatataagacctaaaatcataagactcctagaagaaaacagagaggaaaaagctctctgacagtcgcctttgcaaggattttttgaatatcacatcaaaatttcaggcaagaaaacaaaaataaactagtggaactacattaatctaaaaagcttctggaaagcaaaagaaaaacacagcctacagattatgagtagatatttgcaaaacatatatctgataagggtttaatatccaaaatatataaggaacttgcacaattccatagtgacaaactaaataacccaattaaaaaattgggaaagaacttgaacattttttttttcaaagaagatgtgcaaacggccaacagggaaattaaaacgtgctcaatatcactattagggaaatgcaaatcaaaatcataataaggtattacttcatacctgttaggatgagtattatctaaaagatgagataacaagtgccagtaaaggcaaggaggaaagggaaccctgacatactgctggtgtcggtgtaaattagagcagacattatggaaaattgtctgggagtgtttcctcaaaaagttaaaaatagaactaccatatgacccaacaatcccactcctgggtatagacccacagaaaatgaaatcagaaccttgtggagatagccttactctcatgttcattgcgttatgattcataatagccaagatatgaaaataacctgagtgtccactgacagataaagaaattgtgacacacacacacacacacacaaatattcagcctcacaaaagatagtgccatttgtaacaacataggtgagcctgaaggaaattacactaagtgaaataagcaagacacagaaaaaaatatgctacgttatctaacatctgaaatctgaagaaaatgtataagttgaatacatagacagtagaatggtgattaccaggagtagtgagggtgaggaaataagtcaatgtgtacatggaaacttgcagttatgtgggataaataaatttagagtttcgatatacagctaacccttttttaaaaaaatataaaagcagataataatggggtaaaatgtagtgttttgatctatgcatacattatgagaaagatttgatctagctagttaaaatgtctatcgcctcagctacttaaccctttctaatatttatctaaaatatgtcagatccagagatgtatgaccagattttaacatcatttttaatgtagaattgacagttgtaacaatgattttctcagtttgcttattcaacacccatggaccaagataataaatttaggacctatttaagtagtttctaaaaaggcgttaaaaaaatccccatgggggcaaacaatgtgaatcgaataacatttccaaatgaatgtaatttgctcatttggatgtgagctaagtaaaaaaacgattgtaaaagaaaatgtaagtaatagaaattatctaagaagagcaatgagatgtgttccatctgtgaccaattttggtcaattttttcacaggcatttaatgggtgcaaaatgagccagtcttggtattagaccgttaaaatgcattgtcttctaggagttcatattgtttcccctcccattctgaaaaaaattagaaaaggtaacaacaataaagaattgtggtagacaaaaactcttttgtaaggtatgatttgactcgtataataggtgttacgagtgttgagtggctctgtcagatagaaacagtcaaagaaatgctagtaatgttgtcttgtttgctttacttgtaagtatcttgtgtattttatttacttaatatatttaatttactttaatattaaaacgtgtgtgtgtgtatatatatatatatatatgaatgaatgaattctaatgggtcaggtcatatagtatgtgtgtgcacgtgtgcacatgcaagctgggataacaacgtattatatgatagagtctatctggtgataaacgttcagaggttggaaaagggcattgtgtaccaagctcttgaggtattctgggaaataactgcacaccaagcatttggatattgactgactgataacagtaaatgtacatttattcagctaaataaatgaaaaaaaaagtatcaggcattccaagcagtgaaaataacttaaataagaacacaaaagtaagtctacatttaatatgctcaaagcatcatgtgcatctgtacaatatccaaaatatttccaccagaattaaattttgttattccattattttactataatatttggaggcaaatgcatattaacataatcagtttaaactttgcaatactaaggtttctcttttatttagtacaatgacccaaagttatagaattatttgcctctgatttcttggcaacatatgtatactttactgaaaatttcatctacttcattcttcatcaccctacactcacacagagaaacaaattgataatgagaaattgaaaaggaatatgaaagctcagtgctgatttttatttggttcatgtaaacctctagaagcttagctctattaagattatctgaacctttgtaatactttctatttgaagctatttgcttccaaccagtctatcttatattaattattattttcaattcatcagattatgtggatgcaatggctgataagttgagatatactttgaggaacactgctatgataatcatgatagaggatgcatgggtgattcatagtatttccaactatgtccagttatgtttagtgtttgtgaatcacctatttgcctaccttctctagttgagtaactatatatgtaggtaattgaatcagactattttgctaccaagaatatagcctcttccccgatataaagaggcaccaattacagattatttacctaatggagcattttaaatatggaaggttattaactatttacacttgagtcaacattggaataaaaagttttagctgacaaaattatttgctaagtgtgtacttccatccacatttgccatatattttaaagagcaataaggaaagtcttttaaagtgatgaaattcagggctttcatttaattgatgtttttatgtgacatatttatattaataataaaatgcaaaacagtgaacaggtaatatttaatctttgttcttccttttcttaaagtcaggaagccagaactagtcagtcctatcagtaaaagcaaaagtaatatatccaatgacatttgcttaaatacattaccaagtcctgagaaaggttcttactaatctgggaataaatgtccttatcttgatatgtgtattagtccgttctcacattgctataaacaactacctgtgactgggtaatttataaagaaaagaggcttaattgacttgcagttccacaggctgtatgggaagcatggctggggaggtctcaggaaatcactgtggaaggtgaaggggaagtaggcacggcttacatggccagagaaggaggaagagagagcaggcagagatgctacacgctttcacacaaccagatatcatgagaactcactatcattggaacagtaagagggaaatctgcccctatgattcagtcacctcccaccaggcgcctcattcaatattggggatcacaatacaacatgagatttgggcagggacacagtgccaaactatatcgttctgccccaacccctcccaaatctcatattgttctcacatttcaaaatacaatcatgctttcccaacagttccccaaagtcttaactcattccagtattagttcaaaagtccacagtccaaagtctcatctgagactaaggcaagtcccttcaacctatgatcctgtaaaatcaaaatgagttacttccaagatacaatgagggtacaggcattagctcaaaagagttaaatcgatcagaagaaaggggttacaggccctgtgcaagtccaaaacccagcagggtagtcattaaatcttaaagctccaaaataatttcctttgactccacatctcatccaagccacagtgatgcaagggacaggctcccaaggccttgggcatctccatccctgtggctcagcagggtgtacagcacccttagttgttttcatgggctggcattgagtgactggggcttttccaggtgtatggtgcaaactgtcactggagagaccattctaggctctggaggacagtggccctcttctcaaagctcaagtaggcagtgccccagtggggactctgtgtgagagctctaaccccacattacccttctgcactgccctagtagaggttctctatgcaggctcccccgctgcagcagacttctacctggacatgcaggtgtttccacacattctctgaaatctaggtggatgctctcaagcctcaactctcacactctgcacacttgcaggattaacaccacatggaagccaccaatgcttatggcttgcaccctctgaagcaacaccccaagacacatctggggcctttttagtaacagctggagctggagtgtctgggacatagggagcagtgtcttgaggttgtgcagagcagtgaggccctaggcctggcctccgaaatcatttttccttcctagacctccagacctgtgataggaggggctgctgcaaagggttctgaaatgcctttgggcattttcccctttgtcttggttattaacattcagttcctttttacttatgcaaatttccgcagacagcttgaatttcccccaccaccccgagaaaataggcttttgttttctaccacatggtcaggctgcaaattttctaaacttttatgctctgcttcccttttaaatataagttccagtttcagataatctctttgctcatacatatgaccgtatactgttagaagaagccaggtcacatcttaaatgttttgctggttagaaatttcttctaccatataccctaaatcatcagtctcaagttaaaagttccacacatacctagagcaggggcacaatgctgccaatctctttttgttaaagcattgcgagagtgacctttattgcagttcccaataagttcctcatcttcatctgagaccacctcagcctggatctcattgtccatatcaatatcagcattttggtccaagcagttcaagtctctaggaagttacaaactttccctcatcttcctgtcttctgagcgctccacactgttccaacgtgtgcttcttactctgttccaaagttagttccacgttctcatgtatcttcgtagcagtgccctacctctcggtaccaattttctgtattagtcctttctcgcattgctataaactacctgagattgagtaatttgtaaagataagaggtttacttaactcaaagttcttcaggctgtacaggaagtatggctggggatacctcaggaaatttccaccttcttgtggaaggcgaaggggaagcaggcacatcttataccttacatggccagagaaggaggagaaagcagggggcagtactacacacttttaaacaaccagatctcatgagaactcattatcatgagaacagcaactgggaaattcaccctcatgatcctatcatctcccaccaggcccctcctccaacactggggaacacaactcaacatgagatttgggcaaggaaacaaatccaaatcatatcaatatgctagaatgactcaaacaataaatacgacaagaatattcctcctctgtattgacgctgttcagtatttttctggagaacctagccaatattatatgacgagagaaagttacatgaaatatatattggaaagcacaagataaattatttgaaaataatatgattttctcattatgtaaaatgatctcaaaattaggaaatgtacagtggtaataaaatgatactcagcatagttactttttgtttttcagtttccacaaacaagtgagatcatgcaatatttttctttctgtgtcttgcttatttcacttagcctaatgttcttcggctccatctgtcctgtggcaaataagaagatctcctttttttgtgtttctgttttgagatgaagtctcactctgccactcaagctggagtgcagtggctcactgcaacctccacctccccggttcaagtgattatcctacctcagcctcccaagtagctgggatttacaggcgcccaccaccacacccagctaatttttgcatttttagtagagatggggtttcaccatgttggccagggtctcaaactcctgacctcaggtgatctgcgtatctgcctgccatggcctccctaagtccctaagtgctaggattataggcataagccaccacacctggtcaagatctccttttttttttttttttttttttttttgatggaatctctgtcaccaggctgatgtgcagtggcacaatctcggctcactgcaacctccacttcctggctttaagagattctcctgcctcagcctcctgaatagctgggattacaggcgcacaccaccaagccaaactaatttttgaatttttagtagtgattggcttttaccatgttggccaggatggtctcaatctcttgaccttgtgatcctcctgccttggcctcccaaagtgctgggattacaggcatgagccaccacgcctggcccaagatctcctttttaaaggccaagtaatattccattgtgtataactatatagagagaataaaacagtggttaccaggttgggggtggaaggaggaaatggggagatgtaggtcaaagtctataaagtagcaaatatgtgggataaacaagttgaaagatctaatataaaacatgaggattatagttaatagtgtgttgtattcagaatttttactaaatgagtagattatagcttctcgtggtcagagggtgggggaacgattatgtgagatgatggatatgttaatttctttcattatggtttcattatggtaaccatttacatgtgtatcttatagcatcatgtgtataccttaaaacacacaataaaattatttttaaaaaagagaagttccaaaatctatgtagttttcttagaagtaaaccgcacaagaaagtataagcttttttttataggaagtttaaagttgtatataagtacataaataaagacatgaggaaaggaagtcacatatgatgaaaatgctagttctccctaagttagtttgtacattgaaagtaacttcagtcacactcgcatgttcactggagcactatgcgtaatagcaaaatcgtggaatcaagttgtgtccatgagtagataaagataatgtggtgtgtatatataatggaatactaacgagccacaaaggaataaaattatgtcttttgcagcaacatggatgaaactggaggctatcatcctaagtgaaataagtcagaaacagaaaatcaaatactgtattttcctataagtggtaactaatcaatgggtacacatggacatacagaattgaatactcaacattggagactccaaaagatgggagagtgggaagggggtgagagatgaaaaattacctattaggtacattgtagactatttgtgtgatgggtacactaaaagccgagacttgatcactacacaacatatccatgtaacaaaattgcacttgtaccccttaaatctaaagttcctgaagttacttcaatcaagatctagatggtccctgacttaagatggtttgactaatgatttttcaactttatgatggtgtgaaagcagtgtgcgttcagtagaaaccgtactttgagtacccatttaatcatgccatttttcactgtcactactgtgctcaatgcattacacgatatattcagtactttagtttttatagaacaggctttgtgttagatggttttgccaaagtataggctaatgtaagtgttcttgcatgtttaaggaaggctaggctaagctataatatttgacaggttcagtgtattaaatgcaattttgactcactatattttctatggacaatgggtttattggaatgtaaccctgtcataagtcgaggagcatctgtataattacacactcacatgcccacaaacatgtatgtatgcgactctctgtgtatctatatttgtattattttagaggatataacagaaccctagcaataaatagaatttatctcagatggtaaaatgaagataattgtattttaaaagttacagaagtatatattaacaaataggtgacaagaaataatctagagaggagcaatagtaggaagtagttactatttctactattcctactatatagtagctgaaaggaaagggggaacggagttcagtgaaagctgcaccaatggagggaatgtagttgttggtagaactcagatactacattatgcagctctggagcagggaaataatagagaaatttccccagctttctctttccctcttctttcaatctccagctggtacttcccaccagcttaatgcaactggaatctagccagctaatgatcacaggagatacagtgtgaaagggtcagccacttagagaataagcagagaagaaagggtgtttatgttcagggtgagcacactgaacataaatcacatgaatggtaagagggattcagttttctagataattctaaaatttgtttaaatgtaaatgcgtgagtacagttaagaaattattttcaaacaggtgatttgctttagtagattttataacatacttaacatagtatgacatgatagagaaataatttaatggtgtggaatagatattttgacaacattcccttttatttaggtaaatttagtacacaattagggtgacatttcatgtctctagagatagaataggttagctaataaagccttcaactgtggaaacccaaggcacaacaaatactaagataactttcagataatgattgaatgtgaataaacatttaaatactttattacaatgtagaagaatattacaataatattaaggtgatataaaacctagaggctgtaaaataccgacaaatttaccaacacaaaattaaaatattttccattgtgaaagaccattaaacagtaataaaacctatgatggactgcagaatgacactagtaataaaaaatcaataacctcagtatgataacactcctacaatgaatatacaaagtataatattttaaaagtggctacatattatggtcaggacattcacttgggaaaattagaaatagcccatcaaaataaaattaagcttaactaataaataaatgcatagtacaaatatcttcttattatgagggttcatgtaaataggccctgtgtttcttttggaggaaacacaacttgtaatattttaatcagacaatttagtattatctttcaaaatatgtaattttacatatatttgatcctgaggtttcacatttaagaattagatatatagtaatactcatacatatctacgacaaatgtgtaaggatgttcattgcagcgttgtacacagtagctccagtatttttcatgctatggactgttaggcagatatatctctaccattggactataggcaccataaaatcagggtctaggtttgtttgtgtttgtttttatttttgctcactatttcagctgcagtgtccagcataatcctcgacttatggcaagtgtccaataaatagttacagaataaataaatggataaatgaatacatgcattactgaaattaattttgaagttcacattgtatatatacatgtgtatatacattttaaacttgaaatttgctgaaaacatactttatgccaggcattgctctaaatgccttacttgcacttaccttcttggaaaagtctttgcctcattttaccaatgagggtatgaagaaatgaagaaattaagtttcttatccaaattcataataccagtgagtggtaaagctaaattttgaatctttactaattgagcacatcttaagaaagtacatgcatagacagtgtatatgtttaatctcattagacaggcagatgagtatgataaatggatagctaaaagaatggctgaatggatagatgcatggatgtatggatgacatagcatctggtgacaagtattacttctagctaatgggactgtggtgctgtagagatatggggtactttcactattaactttaaatgcgtctgtactgttttagttttccactacaataagcatgtatggcttttgtaataaaatgtttaaaagtgagagattaaatccagacttatgaaattaaaatatcaaagacaactaacggttgaactcttggggccaaaaccgtcaatgggatgtgttttctctgagggaaagctttcctaatcaaggggcacgttcccattgagataagagtggaaatgacccatctggtcaatccaagatcagagcccatatggggactggagctatgataaggagtcaggctccataggatatagtaattgagatagttataccaagcccctgggtttctggtcatcaggaaagacaggcccctgctagtagagctctacctgagggagaggtatttgagagaggccgacatttcagagtcaagaagaactggaagctataccaagaaaatgggttatgtggtatttagcatatcagttttaaccctcatccagccactgagaaaaggaaagaagaaattttaaaattgcaaatggacaaaaggaacattcagtaattaaaatagcagtaagattctacgcaaagcctttccttttctctatttagtctttgaagttgctaatatctagtcaaagggagttgctttccaaatatgtaatgtttgcatgcatattatagttatatattagtgatcatattgtttataaatgtgtgtataccatcctaggtttttgtttctttattgaatccctttctcatatatctgagcttaaaaagcattttttacaattatcattatttggtagaatcctacccaccgctgactcatagttttagtgagatgacaaggaattcacacacttgaatctttcaaacccccaggtatgcagacgcttagcacaaaatttttggaagctatgcttccaaagttctaaggagtctgcttttcctatcctcagtctgagagcacttgagtacatttttttttctgtagatatcagtcaatattatttttgaaaatacgtttttgtaaagcacggtgctattttgtagtgtgtatgccaaagtttagaacaatgaataaaacattagttttcctgtgtcttgagtattttcaatctgaatttaaaatgtactaactttgtcatcatcactcataggcttcttgattaacctgctaatgctctctaatttggaaattaatgcttctttccctatcacttaaaaataatctgatacagtttctagagcatgagatgttcttcaaatcaagtcttatttttggaaatgtgatcaataagaaaaacttcttgcaatacaataggaagctgaggtgcattatgcttaactttatccaaggtcacaaaatgaaagaactgggagccaaaccaaggactctacttttttttttccactttaatcagactgtcacttattggttgtatgaccttgggctgtattcttaactcacaagagagtggtgaatttaaatgaaaaaaaaacataataaaagttcttgtatataattgatacttgataaaaactaattctataccaaactgaatctcttttgcagaattttgtagggagaaaaatacaggctgctcctgttccttgctatgtgctttctgccccttcaagcagtgctcaattttcaacatgtgtcttactctacattcagggggtgtagaccatgaaaatgaacctttattcccaaaaggttctctctccattcatttactgatttaacaaatactgagtacctactacttctcagtcattggtaaaacaatctaaaggaagttcctgcctttgtggtttttatattcttatataaaaaataaacataataatgacagtttgtgacaagcaatgtaaaggaaatcaatgtaaaataaagggaaaggggttgggcttctttaaatgggataggaaatgcatctctgaagaggtgccatatgagttaagacctaatgggtgagaatgaatcaaaaatgcaaaaagagaaattattttaggtaaaagagcaccaaatatgaagatcaagaggtgtaaaatggccttcggtatttgagatgcaaaaacaaaacaagaccaatgtgtgaaagagaaagagggatgacattagagtgcttttagctaagtgtgaaggattgggtcatgctgtactttacaggcatggaaggcagtgtcttttaacacatacatcaaattctattcactattcaaaaaatatactttagtatatacattttaatgaaaatcaatctcagctatgttttacgcattcttaacatcatttattacattctcttttataaagttatcccttatcatcatcatatttgtgttacatggttttggatgcttactctctttttcacttgtacctttctccatcaatgcttcacatttgattatcttcacttctgtaaatttctaaattgcatttttttcacattggaaattacttgacatccatggatattattgtatttgtagttgggaggtcctaattacaatggtggaagccagaaactccaaactcaaatgaaatttcataagtactgtcaaaaggaaaatgtatctttgtaatttgaaaatgggttaaagtttgctacttcttgattgggtgtgtttcatcagcatgcctccagtagtgcttagaaaatacacaaatgcgtgatgttcgtccactggtttcagttttcagttagagtactactgaaaactttggattagttcaggaaaacttaattcgccatcagttattttgtcagttgttgaagtttgtgtgtgatggtgttttgctcaacactgaaccccttattctgatgttgcgtatgacatatgataccaccatgacaccatcccacataaatgttttgtgctgagagagtcacatcagtgttgtatgccatctggtttgtccaatggtccactcgtttcttccttaggaattaggaaatggagccattctaattataaaacgtgattaattgcttggtgaattggtatcatgtctgacacatggtaggcattccacaaatacttaatgaaggcatgaatgcaagcaaacctatgaattacaattatgtgccaattggaaggaaatcaggaaaaataatagatcgtatatattgagcatttactttgcattcattttctctgttaacatcatccctaattatttgcaagatactaatatgactcattttatagataaaaactgggacagggaaattagtgaattttaccacagtcccttacctattagtgatagggtcaggatttgatcaaggtatttttgcctcaacaggctaagctcttttatatgtagtgggtccatttttaccatatttttttcaaaaaaaaaaaaacctgatcattttgtacaatatctgcgttaagctagtcatcattgagtaatttgccccaggactgcccttataccatcaggcatattttgaaatcccaaaatataccagaaagaataataaccaattaaatttatgtcacatgaaataaacatctttattctggcctcactgtgtatcaagtataacttctaacactgtaaacaattaaggttcacaaatagactattttatgttagcgaggaagataaggggtggagttacttctgaaactgactatactttttctagcagcagaggaaagaaaaagtcaatttggttaggtcaaaagcaaagcacgaaaaccgcaggtgacaatcacttaagcagagttaaatgtcactgagtcaaaatactttcatctcaaatgtaaaccctaatagttcttcccacaacaggcatgtcgagagaattgtaagaaagtacagatgtttttctatctgtagtctcccatgctgactgagtagcttccatttgttatgtcaagttagtgtctgttctcctgggtttagaagttacataccaaatatttgttctaaggatttaaatagtcaaggatgtatttttcaaataaaatatatttaacatatgtaaacttaggacaattgtgacggaagagacaattttgaaaatttcctgcatttggaaattgaaaatttaaagatagaacttttcctgttgattagggcacacggcagaaatttgatttttgaaaaacttttcaactgaaacacgtcttatttaaaactcctaaagtcacagttggttgcgaattttcatttaactgacttttccccaccagcttctgtgcatttgctctgaggcactctcaggatgtttggtattaacactgcagagcttccattctgatttaatttccaaaaactatcccagcgaagagggcttttatggaaggcaattcaatgaagcagggatacagtggcaagtggtaaactgagaattttgaaattatttattcgtaacttcctttcccattacagtcattctttcatgagaacatatctctgggatcatttatttaccattgtattattaaagtctaaaatatagcctggcacaaagtaactcaataaacgtttgtggagtatatttttctgtgtctcatattttcaatatagatttttttttaccccctccgagacggagtcttgctctgtttcccaggctggagtacagtggcgtgatctcggctcaccgtcatctctgcctcccgggttcaagcaattctcctgcctcagcctcccgagtaggtgggattacaggcatgcaccaccatacccggctgatttttgtatttttaatagagacggggtttcaccatcttggccaggctggtctctgaactcctgacctcaggtgatccgcccacctcagcctcccaaagtgctcggattacaggcatgagccaccatgcccagccatagtttttacaatcactatcattacttccagctaccattatttactggattggctgcatgataagttccatttgtattggtaggtttaggatttattgattaacagaacgctcaaatagttttcagtgtatcagtcttctaaaagcatctgattttccttttttccctgttatgctctaggcaagcattatgcattttgagccactgtttttttcttttttaattttttgtttgtttgttttttgagatggagtctcactctctcacccagggtggagtgcagtggcccgatctcagcttgctgcaacctcctcctccctggttcaagcgattctctaacctcagcctcccgaatagctgggatcacctgggattagaggcgtgtatcaccatgcccagctaatttttacattttttttttattattatactttaagttttagggtacatgtgcacaacgtgcaggtttgttacatatgtatacatgtgccatgttggtgtgctgcacccattaactcgtcatttcgcattaggtatatctcctaatgctatccctcccccctccccactccccccaccccacaacaggccccggtgtgtgatgttccccttcctgtgtccaagtgttctcttttttcagttcccacctctgagtgagaacatgcagtgtttggttttttgtccttgtgatagtttgctgagaatgatggtttccagcttcatccatgtccctacaaaggacatgaactcatccttttttatgactgcatagtattccatggtgcatatatgccacattttcttaatccagtctatcattgttggacatttgggttggttccaagtctttgctattgtgaatagtgctgcagtaaacatacgtgtgcatgtgtctttatagcagcatgatttatagtcctttgggtatatacccagtaatgggatggctggctcaaatggtatttctagttctagatccctgagacatttattcagccaaaaaacacatgaaaaaatgctcatcatcactggccatcagagaaatgcaaatcaaaaccacaatgagataccatctcacaccagttagaatggcgatcattaaaaagtcaggaaacaacaggtgccggagaggatgtggagaaatttttatatttttagttgagacggcttttcaccgtgttggccaggctggtgtcaaattcctaacctcaggcgatgcacctgcctcgtcctcccgaagtgctgggattacaggcatgagctaaagcgcccagcctgagccactgttttctacttgtaacaagatgatggtgatagttttctgctagttacaccataagcatgttgaaaagcgtaatggaaagtgcaaaagataaaattgttttgtgtttctcctggataaatataggccattactttttatcgttattaattttatgatgaaattcaatcatcttcatcaacgcaaattatttccattatgacattttaccgtcctttaatgagaagcattgttactaaatggtaaaagcaactgcttgtatcagtgaatgaagtgctaaaaatggattaattaaggagtacttaatttagctaaggcagaacatatcttgcagaatgttaaaaaatttaacatgggaggagttgtgcaaattttaattaaaatgttgtatatctattgtatatagtgacttgtaagtagagaatacatgtatgtacaatgcagtcagtgctgaatgccaaatacaaaatattaaaaataacaatatcatgctttaatgaattagtccattgccatgatatggtctacaacttagaaactccagcatttagatatcagatgatattataacataaatctcttcgtatgcaagcctcaaaaaataatccactttacttccagcactttgtccttttagaatatcacatcaatgaattaggttattgtttacaaccataggttttggttgtgccaacatataggcctttctgttttcatattttgagcattctggctatggctagtttatgaccagaagtgccttctttccagtttctctattccttttcttctcagtgaatttatttatttttgtttcctaatacaaaccctgtggggaggttgatgctcatcatggtttctaaatgacatcctctcacagtttttgttgtttaataaaactcttaaaagactgaccaactaaagctttgtgagtgcacatttatacctgctatctttgaaatcttgcttgttttcaattacacatgctatgcattataattctgtatttccattcctgcctgtcccttggcagaaacttggcctgaaatttagacagtagagcctcttctttagatttcccagcggtgtttgaaggttacacccagcgactggctaatcggacttccctgaggttgactgcccaagattagttttgttgaaggcactgctttcatcttacttactcacattgactttcttggggtgagggcatgttgaaagcaaactttgtgcgatacttggtcttcaaatacactgagatagtatctgagagaatgaggttaaggtaccatggcagtgtagtgcaatgactggtttctaatctgattttgactagcctttgaatttgccttcagaccgccatgaggttcaacttctttattcgaaaaatgatcaaatttcgctaaatgatttatttgttccatagtatcctcaaatatgaaacactcatcagaaacggtgttattgttcataaagtaaaatctctagcagtattgtgagttctcactattttcattctgagacggcttcaaagattggataagcaattattaaaatctggtgtccgtgagcattttatgtagtagagtcttggtgtaaaattacgttcatgtaattgttaagttcttactttggggattcagccactgctctcatttcataaaatcttaatgtcgtgtaataagaagtataaattacatcccatcattttcatactcctcaaatactttatagtactcattatcataccattgcctttagtcactgtcttacataattctcatcaatttctatgactttaactgtcctctgtattgagtttcttaacaaatacttaggtgatcacagagtgccaggaattggccttagtgcagtcatcataaatgaggattaccccgaagtccataacatttattttgatttcccataaaaagtaatgtttataattatggggtggctcatctgctatatactcataatctaacatagtctaagtatattctatagcacatgacaatcacttagcacatatggaataagtgataaatgctttttccttctaagtaaattcttctggcttcctgttaatagtatacaaatggtctcctacaactaggtttgtttttgtgttaatgatagaaacagcaaaaatatgacaaaaatgacaaaaaaatgcaacatagtaatggtattaaggttcaacaaactttacagttttactaaacattggatttgggcttcataacatcttaaataagagggaatgctcctggtcaaccacagtctctgaaaggagcgtattcttaggttttgcggggggagtcagaagtccagcaatctaagaacatttcagattgggaataggatgatgatagctttagaagcgtggtaactcaggtgagaccattgttaattagtttgagaattatcttcattgaagtgaatccactctggcaaagtttcagaagggagtgtttgctgctggttggctgggggaagcatgataagaatcatggaggaactaattgttaaatgaataaatagggtagattgaaacttttgttggtgtctacttgttaccatggctgcagaacaatcagtgtcctctttcgtcctcttcctcctttgttttattgtcagtttattaatctttatatcctaaggctgtagcacataactttgtatataggcatttccaaagactgtggagtaaatgatttgaaaattgaatgaagtcatttttgatccatcttagaatttttgtcattcattgacttgttttcatttcccccgtacacagttgtaccttagatcttgaacactttatatctggattatggtcctagcctcctatttctctcaagttttcctccagcaatccattctgtacttaaagaatttactttaataaaattttgatggtgtcaccctctcattgaaaagtatttactctctagtctattgaatgaaggccaggttttctagtttgctgttgatgatccctcagttttctatgtacaatctaccagtttcatcttagttttcactactctactctctctaagacacacaaagccactgttgccaagacatcgctaatgtgtccctacctctgcatgtttattctacatattcccactgccccgaatactcttccccattccctcatttccagctattgaaatcctatgcataattaattcagtttcctatttaaagagaattgccttatcctccaatattatatgattttaaaaatctgaacatgttaaacaactggttgtgccaattagaggaacacattttaaattctgttcagcaatgcaattactttgtacttctattatttactttcttattccaaattagaagcagaattcatgaattttctatctttcaaatttcctggataatccattaaaatactttgaatataatagatttcttgaaaatgtatgttgatgaaattcaaaatattttagaagacctaaattcctttcttcaaaaattacttatttctacctactggcagttttgaattccacataatctcagaagtgggatagtaatagtttggggcaaaatggcaatagtttggttaaataagtgcatatttattgtaatgactgatatttatgaacagctgcatttagtccacatgttttatgtaaatgaaatttattacaatgtttgaaattttttggggggcaataaaaataatgcttggccaatttttcaccattttttactttttataatggcatatatttgagaccaaacatacatgcatgtgtctatgtataacacagcagtgaataggcacaggctcaaccctttttgttttctcacatcatggttttatttaatatactaaaaatgaaagagctctaagttatgctaatcacaggtacagctgactagttactagtgagaaggaagaacattttctagaatttcaagatacggtgaagtatagtatctactatataagaaacaattggtcaaatattttgaaaaacaattatcaaatgaattggagatttctaggcttcagaattccaaagctaagtttgtaagattattaaggaaggcagtgttcatgcacaaaatattatttagttcttctttaaaaagtacttgcaaaaattactttgaccatctgttgattaataattaaagtgtaataagttgagccatatgtgttgtataactttgtacctttcagccttgtgcattgaaatgtctaatatcatttgaataaatgaataaaacaataaaacgggagatgatgtaacagtctgcttataagtaatgtttttggcccttattcaaaatgtagcagactagcagtttcagcatcacttgggagactattgcaaatgcagagctccaggctctaccccgatctattgaatcagattctgtagttttaaaagatccccaggtgattcatatgtacattaagaattgagaagcactgtattgttctacggatagaagtagaccaaggaacattaattttttcgtctcttgtaactctttttaaaaatactttaaaaatagctgttctgattaatcatggttctgatacttgcaaaagaattgatgaagtcacttgttcaacctgcttttgtgctaacggacttgagactttactcttggctttttcacttataatcagaacacctgatcagaatatacatactgaatacagatatcttaatagtagttaagctaagataaattgtatggcaaggaaaatacattgccacattaccttgacctcctgccaggatttatgtttatcttttatctttgatttttatattcattaatgattaaaaaactaaaattgcatacatttatcatgtacaacacgatgttttgaaatatgtatacgttctggaatggctacattgaactaattaatacatgttttacttcatatgcttagcatgtttcatggtgagtatacttaatatctactctcgcagcaatttttaggaatacaatacattgttataaactaggttgtacaatagatctcctgaacttatttttcctatctaactgaaattttgtgtcctttgaccaacatcttcccaacccctgccccacagcccctggtaaacaccattctactctctacttctatgaattcaactttttagattccatgtgttagtgagatcatgtggtacttatctttctgtgcctggcttatttcacttaatatcctccagatttacacatgctgtctcaatgacaaaatttccttctttttaaaggatgaaaaaggatgacaatgaaatgctagcatttcatagtcagaacttatgtgttaacatttctagtactaatgacatacttcacataaaggattactttacatcttggttcactggaatgagtgcagtaagtaaattttaatgccaagtagcaaatgaatcttttgaaggagctgccactttatatgtgttattacaaagtattattgactttaaatgctgcgtttcattcactttctggatgtggcaaaggatatgaagtcagatcaacttaatgtgcgggacttttacatttgtctctaatgtctgagaaggaaagtgatattctactttatcccatgcaccacaatgtaaacaaatatttttaacatacacggaatagtaaaaatcattatatggtatttttctgtttaatttatattgtggatacatgactcatttcagcagagacttatttagctctctgcatactttaatatcagcaacattcagttaaaaggtatcaggtttctttactgagaaccaaagcggtaaaccattttgtgtatttgtttaattaccagtgcaccatttgaattgacatgttaatataactttccattggagggaaaatgtaatcttttatttttgtttcttatctaatgaaagctactctgttagatgggctagtttggcaatttgacttaggaaaaagtaatatggaatgaagtttttatatgaacaaggaaaataaattaactttactgctcatctcattggtctgccaaattggaaagacattttaggcctcattctcatgttctaattagtctctggaggacattcatggacaattcactgttcattaatctatcgtcttcctttaactttgatttgttcattatccttttagagtctcaaatatagaaaccaaaaattgatgtgtagtgttaatgtgcttacagatgttgataccacctatccagataagaagtccatcttaatgtacatcacatcactcttccaagttttgcctcaacaagtgagcattgaagccatccaggaagtggaaatgttgccaaggccacctaaagtgactaaagaagaacattttcagttacatcatcaaatgcactattctcaacaggtaaagtgtgtaaaggacagctactattcaagatgttttctgttttatatgcatttttaggtattacgtgcacatatatatataacttatatgtatatacacgtgtatatatacaaagcctaatgtatgtatatgtacaaaaagagacagactaaaccttttcaattttgcttcattgactacaatattcatttcaaaacatattttaaaaatactattcatatgtaccatatcataggaatatagaacataatatattaaatttccattgtgtaacacacaatgaaatgaaaggcaaacttacgtacatattaaactctaaaatcttcatcaactagaacaaagagctagagaaagattaaaggcaaatacagtttttaatcattaaaaaatactttatgacaatatgatgtacaaagtcagattttgattattcaggataacaattttgaaaatagaaaagtgttttaaactatttcaaataaacaataaagaaaaacatgatgaaattcttcgttacataattgtatagaatttagtggggttcttccatgacattggcttgttctttctctcaacagtgggtggtttggatgttttcctatgctttctcaggcacaaacaacagtgaagaaacctttagcaacatttctgctgaatgtgtggagagctcttaggccaaactctctcactttgctgagctagctctgtattagcttatgaaatttttagtcctttccagggtatggacctgatgaattctgtttttatttactttggatttagagaaaattgcttatggatgcctgtttttgccggattgaagagtaccatcccatataaatgttggagttgtgttactttggaatcctcatggctaaatagcatgctcatatcttcccagatcatttactctccaacatgatattaagtgccttcattctgggagtataccaatttcgaatatcatttatatatgtttagtattaaacattgaatctcaccatttccatttaatgttctgttttctaccatgttggaaagtagtcctttcgggttacttatggtttttccccctcctctctatccactcccccaaacccttctctgcagatcacggtcagtctagcacagggatatgagagaacttcttcccctaagcctcgattcaagagctatgcctacacacaggctgcttatgtcaccacctctgaccctacacggagcccatttccttcacaggtctgtcaacatttactctctgttgtacaaaccagagaactgcttccaagataatctaacactgcttttacttgcttgaatttttcagtgccttttatctcctcgtgaagagctggtttgtttttccaagttttattgattccctcatgtgattctgctttgttattgagtcttctctaggtttactatacgttgattcttcataaatatgaattcccgtaatggtttctactttcattatgtaataacctctaaggttctctttgacaaaggctgctaatggttataaaaaacatgaggctcatgaaaagttttatatatgtaacttcgaaaagtgtaggtacatctgtgaaaattgctaattacactatttggggagatttttctggatctacgtaaaggaaatacatacattctaagtgaattattttatctattcattctaaaatatatattctatgtaagaaaaatataactgcaagcttcttcatatgctctcctttaattttgctaatttaaacttgtgtatagcaggctctgtagtatttataagaaaaagtcacactgaaaccaggtcatattctcggcaatgtttagtactttctatatgaggaagactcagtggagttttccaccctttcaatattgtatggaacccaatatacaagaaatagccttataaatgttacagcgtgggaatgaaatgtgctaggattgctagatttgcaagaattactttttaacaaaaatgatttattttgctcaatggagccaattcgaaacgtgctagaggatgtgatttttatcaaaactacactatgaatgggagtttaaaaatgatagacctgatcctatcggctaaaaaatgtgtacatttttggagactcaattttttgttaagatagtggtgtgcatttaattagtaatttatttggcagttaatcgatgcattagctgaaaattctaagctttgaaatagttatgacctccatccttggctagtttacttgcaaagctctcttctcactctctctcattctggacctcttgactctccatcgactctctagactcaatttatcaccattccctccgttgaaatcaccaagacttaaggaataagtgccacctcctaagattaaggagcatacaccaagcaaagatataggggtttttttccccctctcattatcactttattgagctgccttttctaggttttctccaatgcctattctggtagcacattttcacctcatcaccaccttcattaaggcatcgctcaggtatgactccttaatgaagtaattacaaatggacttacatcttgctaggctctgctcattctacctttgtgtaaatattaccaaatacataatatgtcataaatcacagataattcaacaaattcacttacttgttttatttaaaataagccattcaaataaatgtaatgtttatcatttaaaaaagacacagcacaaatcacaagagatgggggatggggaatgatatattctgtcactaaaggaagcatatcagaagatgatgttacatgtagttaggtttgataagtgtatgccttaattattcacactaagaacatttatttcaaaagtgtcaaaaggactgagctttcactgcccctacaggctgtacctgctctacttcaaaggaactcaagacaggctggatctgattccatcagaaagctttattaaagtgtttacttgctggtctacagagaaaaataacgttctctataagaggagagagccatgtgggtgactgtcccctatggaaaacacgtgcatgccctcactccccagacacatcactctgctttaacttcatttatttattcaacaaataagtattcttaatcacagagacaaatggcttttattcagctctcctaactttctaccactgatgaaacatttttctcagcctctacactcagcgggttcttcctctctgactattctgtgtctttcattacctggctctttctgttcttccaacttctttagcttatgaaactcatgggaaatatcttggcattcttatctctgtacttgttcttttatcaacataatttaataataatttaataacctggcttcaatctgtattcaatctgtatgcaaatgatcattgtatctctgtcttcaccacttccaatcttacttgagttatagccacatttccaattaattttcaactctttgtatgtatctataccttgatatccactaatatctcaaacctagtatgtctccaagtgaagtttattatgaagtttcttgtccattttttaatgttattcagagccctaataatacaatttttttcgcttaattttgtccatataacaaggctactctcctaaactgcctcgaaaagatttatgatatattaatattttatatttttatgctcattacacacgtatttcatgttccttcaaccaaattacatcactcgttctcccacacaggtgccccaaaattttccatattagcttttatgcttcccttagctcagagtgcttttgtctctgttttaaattggccaacttaatttgtatttctaggcctaattagtaagtggcagaacctgaattcaaatttgcatttattcaactccatgcccatgctcattatagtagggtgacgctgcactttctcgacggtgattcttatatattgcgttacgcacacatagagcagtattcatacatttgattatttagcgcttgtgtttgaatcacctattatgtgccaggtactgttattgaagcaagtgacacataaacatgcaaaacaatctgtgtctgaaagtattctaattttattatcctcctgctgtcttccctcatgccatacgtttttaactcatttaataaatggtaaggccgggcgtggtggctcatgcctgtactcccagtactttgggaggccaaggtgggtggatcacctgaggtcagagttcgagaccaaccgaaccaacatggtaaaaccccatctctactaaaaatacaaaattagctgggtgtggtggcgcacacctgtaatcccagctactcgggaggctgaggcaggagaatcacttgaacccgggaggtggaggttgcagtgagttgaaatcatgccattgcactacagcatgggcaacaagagtgaaactctgtctcaaaaatacataaataaaaaaaataaatggtatgatatgagccttttaattttatctgtgagcttttctgtttcatgatcctctagcatagcatatctggtagcagaattggaggccaatatttcatcaaagtcatttccctcctgatgcagtagatgtgacttatgaaataattagagaaatcaaggattaccgtgaggtttcttacttaagcaactggccaaatagagttgccacaaaccaagatgggtgagactgtagaaggaacaggtttgggagtgaacgttaggatttcagttttaaacatattaatcttgaggtgcctatgaggctatgaatgcatgtaaagaaggggttctaagatcagagttgaggataataatttagaagtcaacacatagatgttatttaaatccatcggccaggataagattgccaaggaaaaatgtgtagacagatgagatctctagatgtatatatgatgaggcatcagcaaaggggctgaaaaaggtggctagaaaggggagagaaaaaggagaagatagatgtggcattctggaatccagaagaaagtgttttcagagaaaggaagatacctaactacattaaatattgctgatgagttcaaataacatgatgattgaaaattattcagtgaatttaggaaaacagtagggtacgatgtctgggaaatcctaatatatagcagttactacagtggaattactaacactcctattcactcttaaaactttcccattttgaccgataaagttacatgctctctctagtttatatcccctttaataagaacaatttcagtggtgtgtgcatgtgtgtgtatttggaggtgttgctgattagagtaggttcaaacgacagtaaaagtgaaggctaccctcattgtaacacttaaaaaaacaaactacaccgcgagctgggtgtagtggctcatgcctgtaatcccgcctcttttggaggatgacgcggggagatcacttgaggctaggagtttgagaccagcctggccaacatggcaaaatgctgtttctactgaaaacacaaaaattaagcgagtgtggtggcacacacctgtaatcccagctacttgggaagctgaggcatgaggattgcttgaagccaggaggtggaggttgcagtgagctgagatcggccactgcactccagcctgggtgacagggcaagactcggtctcaaaacactaccctgaatagttgatggccacagggacaaaaacatacttcttttaaattaacccatcctgataactaatcatgtgtctatatgtattagttcgatttttgatgcaacaactacaaacctagtgcccctaatcaacacatattcattattttacagttctttagttcagatgtttaaaacaggtctcattcagctaacattaacatatcagcagggctgccttccttttggaggctgtagaggagaatccatttccatgccttttctagcttctagaggctgaccacattcactggctcattgccccctttcaacttcaaagctaacaagggcaaattgagtctttctcatatgacatcactcttacctatactcttctgcccccctacatctacttttaagagccttcattattacttacttgctatgtgaccttcagagaatttcttgaactctgggcctcagtttcctcatgtgtattattgaaactgtttctaactcatatagttattaggagtgttaaatgagattaattttataaagaacattgcatggtataagcacattgtaagttctcaaaacccggcaaccaatatgattactactttagatacatcaggggttagataagattttgtggtctgatctgagaaaatttttatgtttttattagcacttttatgagaagagatagcctggattctgatttataaacaaactcacaacctgtatagagttcggcaagttaatataccgagtaaaagattctaaggaaaaggatatccttttttgttctgaggttgctgaggaacaatcttggaaccatgcagagcagaacatagtaatgccttttataaagcagaaaaagcacttctgggtgattttacatccagcaatcctgtgttgggaggggatgaggcagaggagatttttcactctatctctgcctttgccccctcctggcacaacttgtccctcagactgtccacatattgtagaaagtaattggcaaacagaggatgggaagccagccagggagaccactccttagattaaaagtatcactaatttgcttcgaggaagcctttatacatcctgatgtgactgaacaaattacccagaaacagaattgttaggttttagctcaactctataaattggtacactgaagacttctgagtagaattttaaaactggaaggaaccttgaagtgaatatatgtgatgatgttattttcaacagttacactcttatcgtttaacttcttttgaaatttactttattgtgtgtaagaacacttaacatgggattcaccctcttaactgatttttaagtgtaaaatacagcattgttcagtataggtacaagttgtacaacagatcttgagaattttctcatctttcatagctgaaccttcgttaattagcagcttcccacttcctcctctccacagcctctagcaactactatttcactctctgatttgatcagcttgagtattttacatacctcttataagtagaatcatggagtgtttgtccttatgtgactgtcttatttcacttcccataatgtccttagggttcatccatgttgttaatgtggcaggatctctttctttttgaatattaatagtaatctcttgtatgtatataccacattttctttatcccctcatccatcagtggacactgaggatgtttccacatcttggctcttgtgaatggtgttgcaatgaacatggcattgcaggtatcccttcaagatcctgatttcaattcttttggataaatatccaaaagtgagattgctagatcaagtgggagttctgtttttaatttttgaggagcaactatattattttccataatagccatgccattttttacttcaccaacggtgtacaatagttccaattattccacatccttactaatccattttttaatagtaggcatccaacaggtataaatgtgatagctcattctgcttttcatttacatttccctgataattcataatgttgaacatattttcatacacctgttgaccatttgggtgtcgtctttggagaaatgtctgttcaagcctttagcccatttttaattgcgtttttagtttttttttttttgccaatgagttgtaggaattctttatatattttagaagataaccagttgttaatataatataaggtcttcaggtctgatcacaaaatcttacctaagccctgatgtatttaaaatagtaatcatgatattggttgctgtctttttgataacttagaatgtagctataccatgaagtattctttatataattcattttatttaaccctcctaatagctctgagttagaaataattctcataatatatatatatggtttgtattttcccattccatagattgccttttcacagtgttgatttgttcccttttctaaacagaagatttttagttttatgtagtcttaattctattttttttgcttttattgcttgtgcttttggaaataattgcgaggatgaatgtcacaagatttttccaatgttttcttctaggagttttatggattgaggttttacatttacatattttatccgtttggagttgatatttgcatatggcataagataagcaccaatttcattattttgcacgtggatatccagtttttccaacaccatttgttgaagagattatcctttcctccttgtgtatgcttggctctatcgtggaacatcagttaaccctatatgtgtagatttatatctgggctctattctgttctattggtctatatgtctgtcttcatgacaatacaatttatttttaattactgtagtttagtaatatattttgaaatcaggaagtgtgatacctccaattttgtacttctttctcaaggttgatttagccatttgggattctttgtggttccatatgaatttcagagtttttctctgtttctgtgaaaaatgccattggaattttgataaagattatattagttctgtagatttctttgaatgtaatgacaattttaagtccttcgatccatgaatgtaggatgtctttccatttgattttgtcatctttaatttctttcatcaatgttttatagttttcagtacatactctttgacctctttagtttattactgttttctttttggtgctcttgtgaatggaatttgtctcctagaaactcaactaatttttgtatgatgattttgtatcctacaactttactgatttttaaattggttctagtgtttttaatggattctagggttttctattcataagattatgtcatctgcaaataggaataacattcttcatttctgatttatatacctttacttttttttttttgcctaattattctagcaaggacttccagtattgccatcggtagaagtggcaagaatgggcatacttaccttgttcctcctgttcctgatttcatagaaaatcctttcagttcgcagttgttgtgatatgacctgcgatctttttatatatggcttttacattgaagcaatttccttctattcctagtttgttgagagtttaatggttttttttaaatagtgaaattgtgttgaattttgccaaacaagttttcagcatctaatgaaatgaacatgtgacttcttatttattctgttaacgtggtgtatcatactaattgattttcatgttgaaccatccttgtatcccaaggataaatctcacttggtcatggtatatgatccttttaatgtgttgttaaaatttgccagaattttgttgagaattttgcctctatatctgtcaaggatattgagttgcagttttcttgggatgtctttttctggctttggtaatgctgaccttataaagtgaatttggaagtgctccctccacttcagttttttcaaagagttcgtgaagcattggcattaattttctttaaaaaatgtttgatagaaatcacttatgaagtcacctcgtcttttgcttttctttgttgagagtttaaaaattacttactcaatcccttacttgtattgatctattcagacttttccatttttacacagttcagatttggtaggttttatgtttctaggaatttaaccatgtttttagattacagtttcttggtgtaaaattgttcatagtggtctctttatgaagattaaaggagcgttattgtgttatagtccaaaaacctagaggtttttaaaaaaatgatttagtgtaagtaacttaaaaacaaaaagttatttaaggtaaagccctcattaagtatgaaaattttataaggatagtataaccaaaatacatcatttattccactaggtgtgtctgcatttaggaaatatgttaaatgcctagcatgtaatttacatttattatttctgatcttcaaaaaaatcttacaaagatgtaactccacaaatggagttacctatcaaaataggttaggaaattgatgcttaaaaaaagctttgaatagtgtgggaatgttatttttcttcttgacatataagtgataattctaaataagaataggaaattttctgtcatccatgtcccaaatacatttcctgttttgtcctctgaattattctattcatgtttattttgatgtaaataagaattttaatggtgttaaacttttcgaagaacattaaggaatattccatagctaagatattaagatgaaaacaggagtataataggaatctagtctgtgggacctgcatatgctattttctctctattactcagttttctcatctctaaaataaagatactttcaactttccatggggtggctaaaataattaatgcatagtgtatgtgagaaaagcctccactatcacatagagtgttagaggggaaagactccattcaccttcttacacaacaggcattcaataagtagttaagggtaaagaaatatttacaacaacgtggatcaacactcttccattttgcattatatttataaatgataatgtaatcttaaaaatataagtcaaaaaatgtagaatgaaagtccatttttacatttggtaaagatatttggagtttctggaagagatgatatataattttaccaaccattctagaaaatgacttttttgtctcttgataccagagataggtccagaggtattgctgtggatgttacaaaaatagagtcaatttttgcgaaccaaggatatttgaatgctctcatttaagtcatgtttattacattttatgggatttgtcggttcctagaatttgaatgaattattggatggaatttagctaatctgtgttccggtgtttaagcaggtcagggcggcttatttgtaatcattaatagtttgtttggatctccacatgtaggctagatgcagtatgccttctttaggaagggcctcttaaggaatatctttttcaaacatttattttaatacttttttatttttatgttttattatttttcttttacaaatcaagtctttatggaagtaagaattcgtgttacaactgattgaccttagttgtgtgactcagttatctcttggcatacctgtgtaatgcttagctcacctgtgtaatacaggtgtgcttaccttgttcaccagtaactattgccatatagcaaatcaactcaaaacttgggagcttataaaaacaacattcgtttttcttattatctcttttgattctgggtctcagatgggttcagggcttctcatataggtgtaataaaatagtagatgaagctgaagtcattttgaaggcttcttcactaacatgcctggtggctactgctggaacttcagccagggcagttggctggaacatgtatatgtggccttatttaatctgcagtcactcactaaatgctggctggattccaagagtaagtgacccaaagagtaccaagcagaaactctattgccttttgtgacttagtcttggaagtcacatagtataacttcttccatagtcaggggtccatcctagtcaaggggcagaaacataaacccaactcttgatggagaagtatcagtgttacatccgaagaataacatgtaagatgaaacatattgtatccatcttaaaaaaatacaatctgtcagaacttacaagattcttctgaagaatccaggttagttgggaaatgtggctagcatggtgcctaacaggtgttcaataaagtgcactctacttactgatgactgtacttgttttaggtaagcttgtacagatcttcaaatatccaggctcctgattaagaagtttgagaatgtccttgcacataagtgtcacagagtaggagccgaaatggccacttaattgctttctagcacaaatgaaatttcaaatccatttggaaataatttgtatgtgtaatttaataccaagaatattaagtagacactgaaacctctacacctttcattttacaggtgaagacactcaagctgagatatgctaagtcatgtacctaagattacagagcagaaatatttggtctaggatcctgatatcctgaattttgttaaacatgatgtcttcttaaggattataattattttaagctaattcatcacactgtcacattttctgtagggcgatctctagtttctacattcattaagtaatttgattttcttttttgcattaattttattacaatctattttgttttcagaaaatattttaatatttttaatcttttctctttaaattattaaccttatattttaatgaaactatattcaaagtgttgtaacatcataattaagatacatgacaaccatgattgaaaatgaaaacttagatacatttctttcttttcttttcttttctttttttttttttttttttttttgagatggagtttttgctctgttgccccggctgaagtgcactggcacgatcttggctcaatgcaacctctgcctcctgggttcaagcaactctcctgcctcagcctcctgagtagctggtattacaggtgcctgccaccacacccagctaatttttgtatttttcagtagagacgaggtttccccattttggccaggctggtctcgaactcttgacctcaggtgatccagccgccttggccatccaaagttctgtgattacagatgtgagccattgtgcccggccatacagatatattccttaaaatgtataattagtggatacccatgcctaattttaatccctgctatagaattctggcagcacatatccttgcatattgtggtctttatctacaaataatatcagtgaaaaaatgtaataatgcttggttaatcaacataaacttgttaccaaacttgtagattaacacagagcctcctattatgtcatacatgtgttaaatccatgtgggtctcaaatctactagcaaacttttttgttttcactaagagtttacccccttaagcatgtcaatgtaaagaaaaatattaattcttttgaagagataccttatttagtaataattagagtgactttaaaatcaacacataattaacggtcacatattttgttcattataaagtttaatagaaatacagtcattttttaaattatgagaatgctatcaattaaatctttggggaaataaactatctttggaaggattaatgatgagttgatggtatcgttatgaaactcctcatttctagatcatctgcataccaattcagctacataaagtcatgttcctcttttatgtgtagcaaatccagattttcaagcttagcattttaaatacttacttctattaggtaacttatttaaagtgtaatgatgccaatgatgagaggtatgtataacaatgggattacttcacaataaaacttacttatagtgaatatttatgaaaatgtttattaggtgtctctgggaactctggtcaatttaaaatcttagtacattttatcttcattataacatgtcccaaggaaatttttggctgaaagattagcattataaaaatagaactttaattagaaatttctatattgtgtgtcagattgctaaatccagtggcaattatctgcttcctaagatatgtagtcctctttctgaaacattcaaatttactttataatacctgaaaaagtcatttcaagaagaaatttagatcattaatggaatgagaaataagattagcccgtggattcttctacttctactttataatttaaatttcaggtgagctaggtgattaaagtcattttaactatttggtacctcaaatagttcaggaacaagtatgccggaagcactgtagtattaccattaatttaataattgcttattggccacttgatcctagaagccaggaataaatgtgaaataaagtttttataagctcttaaaaatcttaacatttctattgcttcatagagcatgattatagttaattatttatggagtcaataaaggaatttagtatggcaattcttgcatcatgtattggttatgatgcttttaagaaagactctaaggaaagttagaagtcaaatataaagttgggaaaattattagtaacatttataacatacgaaggattgatagccctcatatataaataatgctgataaatcaataagtaaaactagaatgccccaataggaaaattcataaagaacatgagccagaaaatgacaaaagcgaaaaagcccatatatcattaagtatgtaaaaagacataccatctacttaataaaaaaatataatataaacaatcaaattatttttaactaccagataggcagattgaaacagtgataatactgataattttgcagaacataaagaaacaggaaacatcaaaagttgtaagagggcttatgacagaataaattgatgctgtccttctggtgcataattttttaatcacaaaatttaaatttaggagtaataatctggtaaatgaaatgatgtaagacatagttaaaacaggttttcaaagagggaaagtttaataaacacttgaatagtgatcaccataggattaataaaacttagggtaaatatttttaatgcaatatcatgaaatctttaaaattcatgctatagttatatacttaataccatgctgtaaagatagcactgatacatggttagattataagcaaagttttcaaatagagtatatatctgtgtgttacgtgtgcatatatatgtgtgtgtgtgggtatatacatacagcaatacacatatctaccaataatactaaacacttacatagggagtatgttctattcgaagttatacatatgggttgtctctaacagcactttatctctgtgcctatttccctagtctcatcctcataactagaactctaaatccattatgtatacacactgtgtgtgtgtgtgtgtgtgtgtgtgtgtgtgtgtgtatgtatgtgtgtgtgtgtgtgttttgtatgtgctataacatttcacttttgcttctatggtgcaatttttttcattggaaatttaacaacttactatttttaccgtcttaatttttaaacaaataagtcattattactcagtggcccttgaaatattgaggcaatatgtctcaaaaacttcttgttaggtgaatggttacattcactccttctttctttctttttttttttattatacttttagggtacatgtgcacaatgtgcaggttagttacatatgtatacatgtgccatgttggtgtgctgcacccattaactcatcatttaacattaggtatatctcctaatgctatcccttccccctccccccaccccactacgggacccagtgtgtgatgttccccttcctgtgtccatgtgttctcattgttcgattcccacctatgagtgagaacatgcggtgtttggttttttgtccttgcgatagtttgctgagaatgatggtttccagcttcatccatgtccctacaaaggacatgaactcatccttttttatggctgcatagtattccatggtgtatatgtggcacattttcttaatccagtctatcattgttggacatttgggttgattccaagtctttgctattgtgagtagtgccacaataagcatacgtgtacatgtatctttatagcagcatgatttataatcctttgggtatatacccagtaatgtgatggctgggtcaagtggtatttctagttctagatccctgaggaatcgccactccttctttcaatagaaaattattgagtaattagtatgtcctagaaactaccataaagctctttaccatgataacccaattgtggtttggagatttactaatgtatcacaatatgcaggttaaagactgctgttagaatgtgttactagtcacttaatgtttattaagtgccatctaaaccagtcattctagatctggttattaaatttcactatgttataataactttttcattccaatgtgcactgtgaatcagcaagggaacgctattcattgtggtcatttggaaacccagcctgatgaaacagctactatctaggatactcccagtcactccgcaaagggaaagaaaattctgaaaggtcttgtgctggcaattaattgcttgaactggaagtgacatatctgcttcagttcacaactcacgagcacaactagttacatggtctcacccaacttagaactaagaaatatattcgtattacatgtctcaaaggtagaaagctggaaataaatatgaatggtgttaataactgctacactgctaaatttatgttgtcagaaacatctaaggacaaaatgaactatgaaataaaaacatggccatgctctcaaaatttgttttttttgatatgaactcttcaagcataaaaaattaaattccaaaattgaaatcataaactaagttaacttgctaaaattcatggggtcaaatatgtgatatttgaatactcgctaatagaaatgtctcaaaatgcaataaaaggctttgggggatagtgagccctctgtcagagtagtgtttaagtatagactacctaatgagactggttgtaaaaggcagtcggtcacgggacacatggcttattaatatgttcacttactatgtactggaaccatatagctgtctaagatgagctttcttctcctttgcaagccttaaatccataattctaatcgatgggtcttgtggaatagtggtaactattatggaatgagagacagtgaaccaagcatggggaacatatatggccatattattgcccttaaggaatttacaaactgagtaagtagagaagatgttgagagtagttctaaatcctgaaataatttcactttacactcggaagaaaatccaaaacaccatcgtgatttgttccctataggtatcctaccttctttcctacccttaaccccatttctcagctccagatacactggcctactagcttggcatcaaatacgccaagcatactttgagttcagtgactttacacatgtatctccctcttcctggaagggtttttcccccagttattcatatggcgcacttcctttaccttagactgcaaagagatcttttctgactaccctatttgatatgccactaccattgttctgtcttctttcaaagctttaatttttttcctcattgtagttatcactactgacattacgatatttgcaggtcgtttttccctaatgagtaaaaactccaagaggaaaaggactagaatatatactaggtacataaagcatattgatcaaatgaatgaaagcatcacgtttcttttatatgccccagtttgcgattgtattgtatattctaagagttgagtgaacagcaatacttaagggagcagctgcccgtgaatctaatatattgttcagggttttgaagcaggtcctgcaatataaaccctgctgcagcacagttttacgtcatcttccttctcttactatgaattattaatcccatcaacctcatcgtaatagaagagttacgtataaaagaatgagtaatacaaggtgggatatgctaccttgtatttcaaacacatgtttgatttttccaaactaatttcagtgattggagagatcgtacaaatatggatatataaggcttattactagcgtgatgaatgggatccaagaatcggcagtttatgcatcctacaatggtccatcgactcgtactcaggaagatttccatagagtaagttcatcttgaacagagctttttacgaggcttagataagaaaagaatgaaaatactttaggtgggacatgatttcaataaatggtattactaaagccatggaaataaccctatgcttaagagatggacgaaacagatattttggaatctttgctgctctaagattctttatcgcctaatagcaaaaagattagataaagaggaaaactatcacttactggtcaaaggtagaaaatgtatggagaagaaatcagtgaaaagtgatgtaaaatatgtaactaggaaataaataaggctagagaaggtaccagaagtagatgagcagctgtggactgttacccccactcccgtctcaaatataaggggcgtagcctgagggttttctgttcaaaacaactttgactgtgtgtgtgtgtgtatgtgtttctgtgtgtgtgtgctggggagaaaggttggggtgggtggaaggagagttgatggggggagagagacagcaaacaatgttgaggctcaaaatgaaatttctatttttaagtacattttgaaaatattggcttatataaagttttcactaatttttgaagtaatattaaatatatgagtcttttaacaaatattgggcattcataatttgagatgtaatacctaattttgaatgaaataattgtttttctcaataaattaaagcataagaattattggagatttttcaccattccatgagaggaaattttagtagtgtacaaaagtagattaagatttatagacagcctttggcttggagaaacttactctactcagtgcctgaggaccagttgtgaagacagtcttatttgtgttggacaaaaacgtcaggcctttgaaaaaaacaatattcaaagtcagtattttgattgtatttgaagttcttagtgatgtttctaaacgttacgttaaatattagaaaaatattttcatggtcatatgtgtcatggtcataatcaatatgatagcttagttttttaagagtacaaaaatttaggccaggcacggtggctcatgcctgtaatcccagcactctgggaggccgaagcaggcggatcatgagttcaggagttcgagaccagcctgaccaacatggtgaagccccgtctcaagtaaaaatacaaaaatcagccaggtgtggtggcacatgcctgtattcccagctactcagaggctgaggcaggagaatcgcttgaaccccagaggcggaggttgcagtgagccgagatcgcgccactgcactccagcctgggtgacagagtaagactccgtctcaaaaaaaaaaaaaaaaaaaaaaaaaaaaaagtacaaatattagagcgaaacgaacatcaacaatttagtgaacgtttcttgtgtcagtttcagtctcagtatactgtgaaaagggaatgaaaaaaacatgtttaaagtgagtaaaattgattgacgtggtctttttcagcatgttttaagtgtttttcgctttgccaattaaaacttctattttattatttacctaaatctaccccccagtaaacaaaatagtatttccattttcataaaaggcagttccttttctttttcatcacccccatctttagagatctttgactttctattttttctcactgcctgacattaagattccttctgttaaatgtttttgaattacatttagttcataagaaatgtttcccctagactttaagaactttcggacataaaatttttcgccaattttgttcattcacttaacaaggacaaaaaaccagaaagagttgggtgacaatttccattcagtaaatgttctttactaaatctgaattgcatattgtggaatcagtaaatgtcaagaacaagccagtctatcttttcacaaaaaaaaaaaccaaaacctcgttgttactattttctattgtttttctagtttctattttatttacttttgttctgatctttattctttccttctattaacttcccctgtggaataactccaattataccatatcatgaagcaaaacatataactgtagaaatacaaaaggctcaactataacactggactaagcattggctgatctcccctagcatacctagcaatattaatcactcagataattaggcactgtcctatatttttgtaagatttataactttaaatttttcattacatatttttttccagtgactttgagacttatcttactttttagtgtgttaggtttatcagtggtgattttattgttatacatgacctcataatagttgttttttctttcagtacatttgttttatgtttaaatttttatatttacatgattaacttatgcaaattatatgtttaaaaatctgttttattgccaaagttgtaaggagggagtcaaagttcctagtcatttatttattagaattattcacaggagtgacaacgtgcgtaagtttatgttgaccagtcaaattttctcttcacaaaggacagaatgtgaaaagcacagattcttttttggtcatggggcagggaaagataatataactctgactgtgagagaatgagggaggagtagagaagggatcacatgttagtgtttattcttgtttcgtagaatgtactcatattggcctggacagttgccctttgattttaggagattaaaatatactaagcatgtaggcacccacccatacacacatacacaacacaacacacacacacacacacacacggacacgcaaacacagttgctaatcagtctgacttttatctgtaattctggttctgctacttactaaatgtgtgacttaaggtatattactgcacattgtgctcacttttgtctatttggatattttagttgacatttcaccttacataaaaaatgtgttgaaaattgttagcaagaaacaccatagggcatcatcatctgctttgtgatacataaaacatttgttaaaactgttcttttcttctgtaaggacactcaacagatttatcaaataaccattttaagtgtacaatacagtattattagagacaacgttgtgtagcagatctttagaatttattcatcttgcatgatgaaaattttatgcccattaattagcatttccccattttctcctcctttcagcctctaaaagccaccactctaatctctgattctctgagtttggcaattttagatacctggtgtgagtagaatcatgaagtatttgtatttctgtgtctagcttttttcatttacaatataccttcaaggttcatccaacttgtcacatattgcaagttttccttctttttaaagactgaataaaattccattgtatgtatttaccacatcttctttatccattcagctatcgggcatttacgttgttcccacatcgtgactatttttaatcgtgctataatgagcactggagtgctaatagctctttgagatcctgatattttgctctttttttgataaaatggcttcataatagttatttcctcatatcattattctaaaaattgagctgctaagtataaatctgatcacaaagtaaacatgtaaatattattttttaatcacacatgaaggatttttatagtaactttgtgtaaaggtgggtattttcttgtaagttattggaatctattaattttaagggagcattccaaattttaagaggtagaaagaaacaaaattccagtgcctatgtagtttatttcattttaatttaaattatgagatgattgaatagtgttcacattagaagtataggaagatagtttagaggtcaacttctttggtcttgtatttctttttgttaatgaaattaatgtgtgttcagtggaaatatgcacatgtgaatatactgttagtttctttaaataaattatatctccaaatgatataataccatgaagccactacaaagttaagatataaaagagtttaattgcatggcatatttttacaatacattaaataactgaaaatgtagctaagacaacattgtgactggttttgaaaaaataaattatttgtgtggttatacatctatatatgtacttagaacaaaggttatattcagaatattttacactagactcttttcaattaattttataggagtttcatttctctgaattttcatttgtcagtgaaattacatattttaaaacatgcaaaaataaataaaacatgtaatttaaaaatgtaaaactcttttacatatatttttaaatgtcaataaatgaaaaactcttacatatatttttcaatttcaataaatgaaaatcaggaaaatagtgacatggtcttcaaaaatcacaatttaatagagaaaactgaagataggaaataatattctaattacggacaatgattaacactggcagaactggtaaatagtacactataaaataaaatactacattaagatatataatcagaggacatcatacctcaatacatatgtgtttgttttgttttttaaagacacgggctaacattactaattactgaaggatggagaatgttaactgagcttgtaatgataagccggtgcagataaataaaatggtataacaatcatcacagtttataaaaccctaagagtttgttaaatgtgcataatagcgtccacaatcccgctaacacaatctccaaacatttttgtgtacacatagtgtaaaggatccagaatttcaatcatattctcaaaagaattcattgccccaaaatggcaatgaaattctgagaaaaatagggtatggtgagactctgaggacttggaaagccaggcaaaatactacttatttctatggtacagacagataagtcctttatgttatattatccatgttgaaaatctggtagattgggaagcaggaaagaggtttcatgtttcagctgcaaactttgtgttcgtggaaagacaagagcaagtgctacataagttgagccattcccagaacaggtagtgaaagggctctattgcttcaactgaagaatgtgttatgctcttatgtataagagggattcttcacaccttataaaatgttcatatcccttttacgtgctttgtattatttatgccccagtgagcttacttgtgagataaaagatgaaatttttaactctgtcaactaaaaacaaccttatatatcttgaatgagttgaccaaagtagtatggttagaaactgataggtatgtcactcaacccaagttttccaatttctgggctctgaatcattttattagcctaagctccttcctgagtgttgatcttagataatgaaccagttactcttagataatgtctgtgatgatgaataatgtcacaaaaattactaactgatattggacaatcattatataacaaacattgctgtaaacacttttcatacattaattcaatgtttataacaaccctattgagaagattctgttaatatatccattttacacttgagaaaattgataagctggttaagaaatctgtgcacagttatgcacatgaaaagcagctgtgccaggatttgaacacacacacaatctcattccagaattgattctattaacctgtatgctaaaatgacacaacatagagctttatgaagctatcattagaggaaaggttgggttttcataaacacacttatgcacacacttcatgatttactaaaagtggatgaatatataagcaatataatgacaaattataaatcaggcaaccagaaaataagaaggtaaaatacaggcaggtttaaaataaaggttactttataaaatgaaaggtgaagtttgggaactggtaatgaggaagaataattgctgtgaaatctatcaacagatgacttcattaatcttttttccttgaaagagattcagatgatattaccatctctttcaggagtggaagagagagaattggagagaaatgttttaaagattctgatttatagcaagcctgtgaaaaaatggtgcattaaattcccatttggcatcctagttgtagtaagataatacatcctttctaaaaattccatttgatgaataagcaaaccaattcaaaatgactccattttattgataatagcatcagtgtcattaatgagaatgctttttgactaacagcaattaactagatttggtgaactgagcaattgaacattgaatttgaaatcagaacattcggcactgaagatgatataagtacatattagaatgattgttgattatttaaggatttattaagttgatgaagaacattaaagtctattatatcctgtattatttaggatgcttggtttcaaatgtactcaagatacaaagagaatttgttggctaagtaaagagttcaaggtttgctcaagggtttaatacagagttttattatggatttaaggagaagtctttgcttctctgttaatctaagcctaccctccataacttttcgaactcatacagaccggcttccctcagcagatcttggaaactcttttcccttgtttacagctaaatgtaaagaatatatctttacccaaataggaaacaaaaggtctgagtttctctctgcttggaaactcttagatcatatgcctggcctgaacacctccctgaagcaaagtacatagcagtatcccacttggcttgcacaaaaaccgagcgcatatctagaactgagagtaataacaatgctttccaaatcaccaggctactgtgccatcagagagtagaagaaaggatattgactgtataattgcagtgcttactacagtcctcctctttgaatatccaacattgctatacacccttcatagcatatattcactttcaaagatgctcagactcctcaaaaagagcaagtataaaacattatccagtgattgcattcagctccaaggttgggatatctgggtgattagcagtccctttcaattagtctttatgatccatccagtggactatgactaagtgaaaaaatttgatgtccagtactgctaagtaaaaagttagaagggcacatcctgattaaaactaaactaaatttataaaagaaaccaaattgaaacagatattatatcctgcactttcagagccttcctggtgatttttccttctgttcattataaattttgctaaatacttgtcttcatcatgatatctgaagttgacatattttggggttttgtgttactttattattctacttattgtgttgtttaaaagtcctggtgcttgccctaggtttgagtgataacaaggtgtttttagttagacctggggtttctttggcaatcagatttgtttactatttataggctttcagtatttgttcttatcaattccatgacccagtaacccaaattctatgatttggttttaggcttcaaatgttaacctcttttgacatctttaagaggcctctgtgctttgcacaatcccctgactgagaaaatttgcagcacagggttggggtagagggcatagccaatctttgagtatatctttgaagtatagattacatagaagctgcttcttcatgataggagggatcgtctactttgtcacaaaagtgctttagggaagcactatagttgattttttttagtacttaagtcttacattctgcctctcctgtctctgttcatacaaacattcgatttggagtaaaaatacaaattggcttttccactcatatcaggctccaaattatcagcctctcaaggcgttcacgttataagccacaggcagagagggcttcttcagacaaagctatattttcttttttttctgtacttcaaaaacaagtaaccattagcatgaggttttttctttcttggtttaaagaggccagtaggtggcaacatttttgtttctatcaaatctcctaatagtgttggtactcgtaaggcacatgacttaggataaaatagaccattgtttaatcaactgttttttaatcatgtaccaagtatcattttgagttggggtgggggaggtttatcatccttgtcttctcataattcagcctgttccacattataggatctattaactttcaacaacccacttcctgataccaaagtccatataaactagaatgatgtttggtacaataatggaaaactcttctcaagaaaacttgaaatatgcagacacacacacgcacatgcacacacatacacatacacacacatacagaaaacatccacattggagcagtaacatgtgacatcttttcttccattaaagatttcttgtaattaaaccttgggaattattggcttatgtaacagaaaattccaaaggaatggcaggattctggtaagcctttaatccaaatattcacattgtcatcacactgcagctccgtatctcagtggctcttttggctcttcactcttccgttatctatgccaggtagttatttctttccctatacagttttgttatgatagatggctgccagaactgtaacatttttttctttgcttatgtcaaaggaaaaataagtactttttttctcagtcaagcagaactctggacaccttctggttggaacatgttaagtcatgtttccacagttaatatactgtgttaaagcataaaatgttgtagttggatttttgttctatgtccctggcaaaaaggatttatttaaagcaatcaggacttatgcatgggattggggaggtgattaattgctcccaagccacaagattccttcataaggatggaatatagtttggaaattattttatggtagtatttgaaagagttcagtgttttcccatgatttaataatataaatccttaatagaataaaatatatcatgaattgcaagtgtatttgaaagtgtgtgtgtgtctaattttattggatccagaaaatatgctctattttttcttggaaaatgctgtgttttatatccactgcattttttttatgttctgtacatttcagttggatttctttcaaagggactgccctctatcaatcaaagtcatctttagcataggttaggctattactgatgaatcaaatatttctagagcaatactttaggacctgtcccacaactaatatattcaaaatttagcaaaagtttattgagtacctgttagaagcaaaggactatgctaggtgttctcatatacatgaagataaatatatgtcataaaacaatgacaaattggctttcagaatgtgcttatttccaatatcatcatatttttcttttctgtcatttttcattttatcatataaagaccttgaggggtgttttttcagagaaacaataaaccaatgatggatgagcccacttgagttagttacatactatacagcttatataaagcataagcatataaaaagtatatgcatctactttcatagtttggattgttatttaaatttggtggtattacattttcttctcacagatgactggtcttaaatgtgtactatagaatttacagaaacaaaccatagggtttaataagctgaataaaatgaagctctttatctggttagattactttgtaaaggacaagaataggggagcctcccaggtcaacctgatgtatgattttccatttttctaaataagttttattgacttttacattttaatggaaaatgagtaattagcagaggtgcagattatatttggcagaaaatgattataatatttttatcagagagtaaaatatatgcagaaatagccaagtaatctgatttgttaataataatagtatcctgattatggttttatcttttgttttaaaataacatttatatagggtcaattttgaagataaatgggaacctggtgaactctgtctctttttctcagagtgtgtgtgtgtatgtacataaatttaaaaatcgaagttatagttaattggaataagaagtttgttgaaaacagtttgatgtctggtaattgagaaatgtttatgaatctgacataatttactaaataatggagagagatacattattcagaacattatataagtacctaggccaaatttctgaaagatccaaggtgagagatatatgtataattatcttggtggtaatttactcatgagtagtattgacattgagatattaacaatttgtaccgacccacttgtagctgagtatatattcttaaattgtgttccaacataaactgtcatctatattggtggatctttgcgatgctttgggttaggtcatcaaaacctaagcaaaccctggggaatgtactttatatgtatattattctcccactcacacacacacacacatcctcactgtttagaagtacacatttgtcaacattacaatgcttttggcattcacagaatctgttcaaattagtacagtgttcactactgccatagcaggaaaaaaactgtacttttgaatcatttatttttaaatcatttgaagtagaaaattctgacaggttgcactgatgaatctttactaaaaataaaggtctttgtttacaaataattacatcttctcaaccagtggtttcatgttgcttactttcttaaaattccaaatagaacaaggtttgcaaaaatcgtcacatatacatgttatcactgttgactgttttatgataatttaggtagcattcattgtacacttacaatatggcaggagcatgtggcagttacttgaatggcaatatttatgaggtttaccaccaatcaagcttcccactatacagattaagattaagacttactgaagggtccttgtgctagtaagaggcagagtaaaatagacctaggcatcttgaattcctaaacctatgatttctaagttatgtcttctggcctttgtgttaaaatttatttctaatcaacagtgatacttttaaaatatacataatagtgtcatatgtgaaggtcaaacactagtaatttaatctgtcaagtacttactgatcatctaatttgtgttaattactgggtgttacttgacttgtcctcaggttctttatgcactagagaggagacagacactcttacagctgctttaagacacagtagagataggaagtataataacttttcatataaatcctctgggaccataaattatagcttcataaatcttggcttagcaggtagcagaaggtataactgaatgatgagccttgatagtcaagtatgatttttataaggagatcatcccatagaaatattacttcactttgtggagctaaatgagaaagaagcacgaatcgtcagttcattttgtgactgttcgtttcgtgtgtagggcatatggttaggggaggaggagtaggagaggcggctggaaaatgaggttgaaggacacattgtggaggattttgcatatcatgctcaaggagatacattttattcagtaggcaagagaagggcattggcaggttttgaataacaagtcatgtgtttcaaccctgggacttatgaagctgaatggagaggcactttgcctttaggaaggattgccaaaaaaaaccaaaaagggccatgctgagttgaaagtgtcaaggttgcctccagaataagctaactgtatttggaaatcagggtttattatcaacagatcagttaagaccagtgatagaatcgcattgcaggggctagggtggagagagataacagagtaatcccaaaaagtacatgaaatttcacagagaaaaaaagtacaatcaaatttgaagaggttcaaggacagaatatttgattgattgttttgttgatcgatctatctatctgtagggaactagaggtgggagacatagttaggtacgatttaagagtttccttaggaaagtaccatcacataacagatatttaaaaagactttaaagaaggtagttatgttaaacagtgctgcaaatgaattgaggaggatgcaggtaggggaagggcaactggatctactgttttagaagtatacttgtgtgctgtgagagggatttttaagtataagtgtggaaaacaagaaataatacatagaattacggctgattatgggaaactggaaggaggaaagtttaatcaattctgaggttcagtgatgaaagtaaggaggagatgggatagttcatagaagaatgatgttaatatttcagattgggagagaattaagagttctgataaactcctaattttgatgatacactctgtggtaggaatctacagtacaccgtaaattcctgtgtataacatacaatgtgctatataaaatatgtggtatcaacctataaatgttgatttttcaggacaaaaatgtccagaaaaatgtaatgaacattcagcatacagcttcgataagaagttttaatcccattagtatttaactaacatactcccatttttagtaagtgattattattagtattgattcctacttaattctcttcaatgccgtagtctctgtattttcctcccttcattaaaaaaaaaaaatctttcaagttcaagttttatcagagagcaagatggcatagggaagagagcagagaccatgacatcactggaacagtttaacatgatttgattttataaaacatgataaaataagtatcaggcggcattttgttttaaaacacttgctgctggaattccactattcatatgataacctgctgatcagtaggactctgtctcctgatgccaagtttttagcaccttctacagcaatgtgtgaataatgcagagatgcgaaggaaccttttaagccaacttgagaaacaagccctgtcaaaaacatgatttctcatgactgaataatgcaacagactattccatttagaaaaacatcagtaaatagtctgagttttgatagtgattacattcttacacttgaggtaaaaaaaatattcttgtctcagtccacaaagttgataggcatagggacatatgagtgtatacactgagggtgtttaacaatgaaatgtgattcaaaaatataacaagatttgataagcaaatgggccagcaatttgaaatgcttcaaattatacttaggctctgagatgaaatgtatgtcatttaagtgtacttttttttttttcccgagatggagtctccctctgtcgccaggctggcatgcagtggcacaatctcggctcactgcaacctccgcctcctgggctcaagcgattcttctgccttagcctcactagtagctgggattacaggcacctgccaccatgcccgactaatttttgtatttttttttttttaaatagtgacaaggttttgctatgttggccaggctggtcttgaactcctgaccttaggtgatccgcccgcctcggcctcccaaagtgctgggattacaggcatgagccacagtgcccagccttaagggtatttttaagtagctcatcaagatgcaattagatttaccattatctgacttgagtagaaaactggaaaaaaaaaaaaaaaaaacacaaaagcagagaatggtgagaacttttaagcgaaggtgtagccgacccagtgtcaaatagacaaaatgtagaaaagacaaatattatacatgtgatcttttctgtcacataatgttgacccctaggatttccatcttatgctttcagtaacagtaaactacaatatttagtgcagtattagatgattatcatgtcctaatacatttcctccataaaactagaagaatggcacttaaggtccaatgaaatatgatggttaaatataatatttgtactcccttgttggtgttgcttaatgcatttcttaatcctccaatttatcgtgtcacacagcactaagctcaacaatttattcataaagtggctgcaaatataatttggaacaaacttttttttgttcaatataatttatttatttattgcttgtataatcacacaaaagtgtgagttccatgaggacagagacagttgtctcttctgtttactacaaacgtcttccgggccagtaataaccagaagttgttacctgttaaataaactgaaagtcaaatgtagggtgatttctacgcatgaggagttctagagctcattgatgtcatccaaggtttaaattcttagtgtaatgtattctaggctcatccatgttgtagcaaatggcaagatttcattctttttttaaggactgaataatattcaattgcatatatgccataatgtctttaatcatttatccatggatacttaaacgttgtttccatatcttggctactgtgaacaatgcttcaatgagcatagaagcccggatatctttacaaggttgtgttattttttcctttgtgtatatgcccagaaggagggattcttgggtcatatggtggttttgaattccttgcctcacaaaaccttgctttgtctttgcttgctgtttttttttttttggagacagattattgctctgttgcccaggttagagttcattgacccaatttcagctcactgcacccctgcctcccaggttcaacgattctacttcctcagcctcccaagtagatgggactacaggcacccaccaccacgcctggctaatttttgttattttagtagagacagggtttcaccatgttggccatgctggtctcgaactcctgaccattcccatcaatgatagactggataaagaaaatgtggcacatatacatggaatactatgcgaccataaaatagaatgagttcttgtcctttgcagggacatggatggagctggaaaccatcattctaagcaaactaacccaggaacagaaaaccaaataccgcatgttctcactcataagtgggagttgaacaatgagaacacatggacacagggaggggaacatcacacaccatcgcctgtctgggagtggagggcaagggtagggagagcattaggataaatacctaatgcatgcagggcttaaaacctggatgacgggttgatgggtgcagcaaaccactatagcacatgtatatttatgtaacaaacctgcacgttctgcacatgtatcccagaacttgaagtataataataaaaaaagacacctaggaatcattctcaacaactgtactgtccttgtcatatttatagtgcccacgtccaatacactctaagatcatatatgtcagaagtctgtcatctccccctctttccctacttctgttttgttgaagtcctcagtatatatctcatcaattcattttttcaacagttcttgagttcttatggcagcagtcaggttctgactattacatactgtcattcactggatatctaactggtcttgctgccctcatcttccatagatcattctccacactgcatccagaatgatctttcataaatataaatgtagtaccaatgttcatggtttgactgtcaattcccccaaaagattaccgggaaaacacgttgatgaaacaacgctgagtgtattagacatggcgccataagggaagacactaacttgacaaggtcttagtagtgtgtaaaaattcctacttctcagttcatatttcgcttcccttttcaatgcttccatttcttcttggacgtgttcttatgagagcacatatattttttgcttacttgtaggtttcctccactggactatgatttccttgagggcagctcttttattctttatatccattgtgatctaagtgagtgattaatacatagttgatacatgaatccacaatatgtgctcattttagtattaattgaatacataagacattgcttcttaagtgtgccttaattggcacaataacaaaatttgttgaggatttactgaagaccaggttcttccatgctgtatgtatattattaacatgtttaacttagcttaccaacattaggagtttatattcttgttattcccattttcagacgagaacactaaggttcagtggtacagaaaagaatttgagtctagatattttgattccacagcccatattcttaattctcggtacactacacttctctagcatgtttgataatatattggtaacactcaattgccaaatgtattctgcatatatcacaaccagtatcctgatatatgttggttgggttatgaaatgacacataatttgttcaacaaacatttattaagtttttacagtatgctagccacaatgtgagattccttatatgtactacctaaattaagtaacttaagtaaatgtaggaggatttgagacatgcatttactttcccctctttgatttctaaggcaccacacattccaggttttcttcctgtttttctagcatctgctttgattttaatttgctggttcttccccatcaacacaaattcctgatatgacagtaaccaggggttggttcttagaccacattcattttctcgatgatcttatctagcctcctggcatcaaatactgtctgtaagttgatgcctcccaatgtttacccccagctcagagctttctgccaaactccaaacttagatacacaactttttatacattcctagtcaattcaaatttaccctatgtaaaactaaatttactaacacccacatctgcttcgtcaatagtttttcctgtgtcagtaaggtttcactatagccttccagttgccccaaatgaacatctttgagtcaaacttagtcttgttctttctcacacctgatgttgttgattagaaaactatgccaggtttggccggatgcggtggctcacgcctgtaatcccagcactttgagaggccgaggcgggcggatcacgaggtcaggagatcgagaccatcctggctaacacggtgaaaccccgtctctactaaaaatacaaaaaatttgccggccgtggtggcaggtgcctgtagtcccagctactcgggaggctgaggcaggagaatggcgtgaacccgggaggcggagcttgtagtgagcggatatcgcgctactgcactccagcctgggtgacagagcgagactccatctcaaaaaaaaaaaaaaaaaaaaacctatgccaggtccaccttaaccaggtatatatccagaatctgatcacttctgactacttacatggccaccaccatcacctctggtctaaattagtgaaatagccttttaaacaagcctgcctgctttggccttgccttacctgtaatccattttgtctgccagatggtcttgttaaaacgtaaggcaaatcacatcactcttctgctgaaaaccttcccatgccttgccagacattcagtaaaatgcagtcctgctgttttataagcccatgcacaatcacctcctcctttctctatgtttcttctctggcttccttttccaccgttgttaccgtctctcattccaccgcagtcatagatgcctctacctggaacacatttcctccacatactcacatgacttactctctcatatctttaaatctttttctcaatgatattttccctagtactttcaattccccttccttgcttccttttctccataacacttacatccttctattttacttatttctcttgattagcatgccttcagtgacatgattcactgaatgagaacttagatttctgtctgttttgtatatggctatatcatcattgcctaaaatagtgcctggtcctttgtagttgcttaataaatatttgttaaagcaacactatttgtactaagtgacagagccagaattccatatgattttcaagctcttctctataaaataaatgaagttatgatgtattgaatgtataaaggctcttttgttagttgctcttctacctggcaagtctgtaattaaaataattttgtaaaaaattatctatttgaagtttttttattatttgttcaattgccagtagataggctagacaaagataagtttaccaattgattatggatatcttacattcttattaaaaagcaaaataataatggatataacacattattattttcatgattaaggatatatcacctctaatgagtagatactaaaagagccttaattttctgattcccttatttctcctcaaggcaaggatagatatccctgtgctgatggcatcgaatgcattggcaagcctaaaatcaaacaagctttctagtagactccactcaagattatcatcaatcttcctttgcaaatttggttttcagtttttgtcttcacattgaaaaatagtcaatatattggcaacaaatgtaatgcattactcaatggcaggtgatatcgctaaagatggtcaattacatgctaaaaacaaaggactttgaggtctgttggatgccaaaacctacagtcaattcagtcaatatttttgacagtacagagggaaaaatcactcaaggaaaattgccacagtatacattaaatatctttgtttatcccattttagttattttgtgtgatatctctaaatgctgttctgtatatgctgctgacaaggagcaaatttatttgtttagaaattctgcagcctttccatcctttgccttaactttcttgttgaggtactaatgagctgtgaaaggccaaatgaaagagaaataacacctccagataatctgtactctgataaactactcccagaataattgggagtttatggttgttgtagggcagtggaagaaataagcaatgttggccaactatacggaacaacccgtgttaataaatttgtaaaagaagtttacaaggcaatcacaatcctttcaaacaaatgtcatgcatgtactttcaggcctaggcacaatgttattatctgaaaagcttgataggtaggattgtattttgtcccactatttctaaatcaggaaattctaagcatacttgtgacgatttctcttttaccttaaatggcttccctattccagatttacagtttctgcatgagttttctactcaatttgcataattttaatttacctttatgttaaggtttttgaagagctgccgtactttcatatttggagtttaacatattttaatttatggacgtggcaataatttgatgacctttttagtgtaatataaagcctatatataaaaacttccaaatagaatatgtactgagtttgtaggaaatttataagtattatgcaaatcaagaatatggtagctgattccactagaggctattttgaaaatataaagaaactttgtttttaaacatagtattgattatctcactatgtgacaaaaaggtatttctgtttattctgtttctttccatttctgctttccaaagtagaacaaataagttgaaatgtaccaatgggtgtgttttaagttttgacaggtttcgggtatgattatataccaacaaaatcccagtaatatttgctgcatatttcattgtatctatattttatgtactgatttaaaatttaaaatgtgagtaaattttaaggcattgtgctaatgaaacttatggtagttcattttttatttttatatagacaagctatctgtttagaatgcaaaaattatatgccatatacaatcatattataaacatataaaattggtcacagaaatttctaagggtgaaaaagactggatgaatcaaagaaatctatccacaattctgtgagtgtatgagagacttagaatgatcacattcacataaaatataacacattattatattttgatttttaaattaaattttataaatctagctatctctgggaaatgtttcttccccttgagttattacaaaaaagtctggcaacaagttaatattcaggatttcgtgagacagatactgaattcagttcccatctctgctttttattagctcttcgaccttgggcaagtttctaacctttatgaatcaggtctcctcatagtaaaatgtagacaataatcatcccttatgttgtgaggttaaattagatgatttagtggagtgcttacaccatccctcacaaatggtaaacacttaattcactatacttcagttctggtggtaaattctaaaagaatttagatgatgaagacagcattataatttaaagcacagtctacacagtggatagcacccacttaggagatacacacgatgaactggggttctagaaggacatattataatgtctcttcacaggcttatttaagaattaagaaagaaataaactttaccaatttttaatatacaggttttcagataatttgatgtaatatatggtacttgatatcttctgtggaaaatcagagatccttaataggatgcataatgtcaggcctctctcttatttattagcgtttttggtgctcttgatgtgctgctatgtctatgaacactaaagtgtgtttatagattatgttatcttaagtagtagaatacttaaaatctttgtcagcaaaatcagagtaacctaggaaatctattttactacacagaaatgttctggacatctcatggcaaagtagttgaaaagattgagttatgtactttatttttgaaaaggtcaagtgttacataaatgctgaacattttcaggttggcaagtggctgtgagtactatgttatttctcaaattatttccaaaagcagaaaaaaaccttcaatctttgaaggagaagcttctgtattaacaatattaagaaagagactagattttataagacattcatgctatggagagagcattttaaaaatggatatttggtggtagtcccattataaataggtcagttataaaatattctatacctacagaaaataaatggaaagaaatgtcaaatctgtttaaaaatattataagtgaaaactttcagtgaggttttgtctctgtttatgactttaggacgtttactttctatgttcacctcacttagggttctgtttcgcttttctgctcatgcttccatttcctcagttggtaatatacacatatctgtacatatcctttaatcctcttctagtatcttcaccaaatcagaagtgattgctcttatcacttagcccaccctgattttgagttttttttttacttgaaaatatgagaagtaatgttagtataacaagagatggaaacttatcaaaaggtttcatacttttatttttctgaaatgcaaaagacttactgcgttcttctcagttctatgaaccctaagatcaaaagctttagttgtctatgggacacagagatacagaccctgaagcatgattactcctattaggagccaatgataaaattgaagaactttccactgctttcagccaacaggatagaggacttttattactttccttgaggcagagggtggaatttgcaggtgttaatgaaatctaccagagtcttcccaagaattaataccattctttgaaatggcaggctctgaagacctttccttgaataggaaaggaataggaagagattccaagaatctctttccttgaatagggaagccaacactgcattgaagaaggcagtaagtgaaataaacaagtggagtttgtgtcatttcttgtccctgctctgtcatggaaagatgccttggtctaattctcttaggaaaaaaaatgtcctcatatcagtataaggtaaaatggaatattgttacatgtcatatgctaagagacacattattgtattcaacaaacatatagtatgttatactgtatgtcaggtgctgaacaaaataaactgtctactgtcgtgaggcttccgagatgctacatcacctctcataaaagaacttccccatttccacaatcacacccttataattgtcttcctaattagctcactagttatttatattatttccctaattttaataatgaaactatcccacagaagcactatagatgcccaagaagtagagacaggaagctacccattagttcccccatagggatttctctcccttatgaaggatataccacatctttgtttaaggaataaggaaaagagacaaaggtatgtaacataaataaagagaaagcacacagaatttagtgatatatgtgaaaggtaacgggataaaccaagcaactggtgtatgttaaggaggtgaatatagctaatgtccttggagaaaatttacctagttagaaaagatgtgtcaatttagtagaatatttttacaacctaaaatctaattgaaccaaactcctctttattgttgttagttctctattctgggttgcactaaataaaaacaatgaggcagtgaaagtgattttataaaagttgaatggcaaagggtgatgctgaatgtcaatacaatcgctgtatgttgtctgtgagccttacaattaccctctaaattagtatcatatctattttcaggtgtgtaccaagagtgtgaaattaaaaaactttgccaagttcaagtacacactacctataaattccagaacctgaatttgacctcatgtttattttactccaaagtgaggccgacttaaagtttcccgaatgcggccactggttttatgcagcatgatttctttgagacattgttatatacagcaatggaggtagggcagggggagggcagtgagatttcagagatggctagcttggacatgcaatagagtgggaaagtgacccaatgagaatcaattggagggggagagattggagagaggaaagataatcaacagtgagaagttcagagaaattagtttaaatgtgggaagcaatttcatcatcaggagatagcaatctatggcctgagggtgaaaatagacttgctacctgatttttgtaaataaagttttattggaacacatccatgtttattcacttaatgtattgtctccagatgctttggggctacaatttgcagtgacagagctgagttgggggcatctggtctttagtggtctgcaaaattgaagatacctattatctagccctttacagaaaaaagcttaaggttaaggagtcttggatcaaataacaggaagaataagattttcactgaaattagtgtaagtgtagataagtttctatattttggggacatctcttgtgctaacttctaatttctttacatatagacttgtggaataaatgagtacatagctaagaatattataaatgatgagaaaaaaagcaaaattccaaaacgggctacatgggaatatttatgtttaggttctcctcatagctcacaattaatttgtatatgcaattacaaactctatggactacggtcattctagaggaatattatttaagtgcagtatatgtcaatttgaaataataagttttcacgagatatgtgtattttgttttgatttttttggtatgtaaaaaccacttgtctaaagcagtttacttctgaattattttgcattttaaaagtatccagtgaatcatttttttcctatttataaatgactgattaaaataaataagacttggtgtttttccatgagacgtatttgaaaattaataaaattgttaaacttaggattaaggaaaataacattaagaatttatttggtcttctgagacattttgtaactatcctattttaaattaaatttagtacttttacaaaatctcgtttcaattaccaactcatatgaattccaaccaaatactgacttttaaaattattgaaacatccaccaaacagtacagagttattatgttcatccttcttctctggacttcatgaatctctgtcagccaaggaatgtcggtttgtttactgggtatcccatttttcctcccacacctcataggtgtgacttggatttcctcatcctcatcttggaaataggtccccccttttagggtgtttgtaagaattatatgaaacagtaagaacaaagaaatcactaggctagacgtctttcatgtgccatctaataaatttctgagaaagtttttttattgatgcttatgaaaattttattataaacttgcttttaaaaagaaatcttttatattgggttattaaattgttctaggtacatttctctaaatcttctattattttctctctgaccttccattgatttaggagaatttgccataacagtgcttatttctttttcttccttcttgattttatgagaaaggttctattgtgtggattataatagccaagacagaaagtctcaggtgaagtacaggaaaaaataaaggaataaaatataaaataagttagaaagtaaatgtatacccaaagatataaatggtagaattagagaaattagaggaagaaaacacacacacacacacacacacacacacatataagttggtatactatatatgtatgtgaatatgtatatatgtataaacacatatgaaatatgaataggaatattgggaagacatatatttgaaactatgaatattttatgccatattactccattttcaaggtattgattggttaaaacatattttatataaaacctgaaattggaagcacaaatgaccttaaataagaaattaaaattaccccaaacaatttagtaaatatttattatctgtgtactgtgctgttaggcacggggtcagtgtccccgccttcctacaatgcaagggttagtgtaatatctaaaggtatgtgacttgaaaaacgatgaagcaaaatgactggaaccttcattgagagtatgttttagagagacagagtagagttttagagagacatctgattttatagtagaaagtttattttaaactcacatataagcttttacagatacatttttatagtaaaatctcagctgctagaaaattagagtatatcagtatatgagattgctgtaggtttcgtggcactaacaaaaacacaaggatggatgaactaaaaaatgagtttgtttctctttcagacttacttctcttaaatgttgtgtagatgggagtgatggaggccttgtaggaagtctctgctcattcagggatccatagtcctgttgcccagtttttcgatcatcccctgggacgctgtcttcgtagtcacggttgaggatagctcaccagcttcatgtgtgtatcacgaccttcaggagggaggacgaagaagagagcatatctatgcccatttacgtcttaatgacgaagttggatgcgttatatccaactggccaatacttggttacatgccacatctaactgcaagggaaagtgggaactgtagtgacatttctagatagccaaattgtcccctaaactttctaatactacataaagggtgaagaaagatacatattggaggatgagcaatctttgccagagccatttttttaatgtaggaattaagattaatgtttttcaaaaaaaggcaggggttgcaatcctagtgtctgataaaacagactttagaccaacaaagatcaaaagagacaaagaaggccattacataatggtaaagggatcaattcaacaagaagagctaactatcctaaatatatatgcacccaattcaggagcacccagattcataaagcaagtccttatagacctacaaagagacttagactcccacacgttaataatgggagactttaacaccccactgacaacattagacagatcagtgagacagaatgtcaacaaggatatccaagaattgaactcagctctgcaacaagcggacctcatagacatctacagaactctccacccctaatcaacagattatacattcttctcagcaccacatcacacttattccaaaattgaccacatagttggaagttaaagcacccctcagcaaatgtaaaagaacagaaattataacaaagtgtctctcagaccacagttcaatcaaactagaactctggattaagaaactcactcaaaaccactcaactacatggaaactgaacaacctgctgctgaatgactactgggtacataacgaaatgaaggcagaaataaagatgttctttgaaaccaatgagaacaaagacacaacataccagaatctgtgggacacatttaaagcagtgtgtagagggaaatttatagcactgaatgcccacaagagaaagcaggaaagatctaaaattgacaccctaacataacaattaaaagaactagagaagcaagagcaaacacattcaaaagctagcagaaggcaagaaataactaagatcagagcccaactgaaggaaatagagacacaaaaagccctttaaaaaatcaatgaatctaggagctggttatgatcaacaaaattgatagatcgctagcaagactaataagaaaagagagaagaatcaaatagatgcaataaaaaataataaaggggatatcaccaccgatcccacagaaattcaaactaccatcagagaaaactgtaaacacctctacgcaaataaactagaaaatctagaaggaatggataaattcgtggacacatacaccctcccaagactaaaccaggaagttgaatccctgaatagaccaataacaggctctgaaattgaggcaataattaatagcctaccaaccaaaaaaagtccaggaccagatggattcacagccgaattctaccagaggtacaaggaagagctggtaccattccttctgaaactattccaatgaatagaaaaagagggaatcctccctaactcattttatgaggcaagcatcatcctgataccaaagcctggcagagacaaaacaaaaaaaagagaattttagaccaatatccttgatgaacattgatgcaaaaatcctcaataaaatactggcaatccgaatccagcagcacatcaaaaagcttatccaccattatcaagtgggcttcatccctgggatgcagggctggttcaacacacacaaatcaataaatataatgcagcatataaacagaaccaaagatagaaaccacatgattatctccatagatgcagaaaaggcctttgacaaaattcaacaaccttcatgctaaaaactctcaataaattaggtattgatgggacgtatcttaaaataataagagctatgtatgacaaacccacagccactatcatattgaatgggcaaaaactggaagcattccctttgaaaactggcacaagacagggatgccctctctcaccactcctattcaacatagtgttggaagttccggccagggcaatcaggcagaagaaggaaataaagggtattcaattaggaaaagaggaagtcaaattgtccctgtttgcagatgacatgattgtatatctagaaaaccccattgtctcagcccaaaatctacttaagctgataagcaacttcagcaaagtctcaggatacaaatcaatgtgcaaaaatcacaagcattcttatacaccaataacagacagaggcaaatcatgagtgaactccattcacaattgcttcaaagagaataaaatacctaggaatccaacttgcaagggatgtgaaggacctcttcaaggagaactacaaaccactgctcaccaaaatacaagaggacacaaacaaatggaagaacattctatgctcatggataggaagaatcaatattgtgaaaatggccatactgcccaaggtaatttatagattcaatgccatccccatcaagctaccaatgactttctacacggaattggaaaaaactactttaaagttcatatggaaccaaaaaagagcccacattgccaggtcaatcctaagccaaaagaacaaagctggaggtatcacactacctgattttaaactatactacaaggctacagtaaccaaaacagcatggtactggtatcagaatagagatatagaccaatggaacagaacaaagccctcagaaataatgccacatatctactactatctgatctttgacaaacctgagaaaaacaagcaatggggaaaggattccctatttaataaatggtgctgggaaaactggctagccatatgtagaaagctgaaactggatcccttccttacacattatacaaaaatgaattcaagatggatcaaagacttaaatgttagacctaaaaccataaaaacctagaagaaaacctaggcaatacctttcaggacataggcatgggtaaggacttcatgtccaaaacaccaaaagcaatggcaacaagagtcaaaattgacaaatgggatctaattaaaccaaggagcttctgcaaagcaaaagaaactaccatcatagtgaacaggcaacctacagaatgggagaaaatttttacaatctaatcatctggcaaagggctaatatccagaatctacaaagaagtcaaacaaatttacaagaaaaaaacaaccctatcaaaaagtgggcaaaggatatgaacagacacttctcaaaaaaggcattgatgcagccaacagacacatgaaaaaaatgctcatcatcactggccatcagagaaatgcaaatcaaaaccacaatgagataccattgcacatagttagaatggtgaacaataaaaagtcaggaaacaacaggtgctggagaggatgtggagaaataagagcacttttacactgttgatgggattgtaaactagttcaaccattgtggaagagagtgtgcaattcctcaaggatctagaactagaaataccatttgacccagccatcccattttatcccattacagtaatatacccattactgggtatattcccaaaggattaaaaatcatgctgctataaagacagatgcacacgtatgtttattgcggcactattcacaatagcaaagacttggaaccaacccaaatgtccatcgatgatagactggattaagaaaatgtggcacatatacaccatgaaatactatgcagccataaaacaggatgagttcatgtcctttgtagggacatggatgaagctggagaccatcattctcagcaagctaacgcaaggacaaaaaaccaaataccacatgttctcactcatgggtgggaattgaacaatgagaacccttggacacaggaaggggaacatcacacactgggtcccgtagtggggtggggggaggggggagggatagtattaggagatatacctgatgttaaatgacgagttaatgggtgtagcacaccatcatggcacatgtatacatatgtaacaaacctgaacgttgtgcacatgtaccctagtatttaaagtataaaaaaaaagattaatgtttttggctctagaaccttttgtttaataggctatagaatgagatttttaaaaactaaaataccccatatgtgtacgtatgatacccatttttgtcttcttaactggagcatcggaggcacaatgtagcatttctgtgagtggttctgcaatagtgaagaatgttaaatttgctgacatttaacatcaaaggcaaatcatagggattaacagaaggcgcagagttcgaatggtggacttgacacatgccttcttttagaaagaatttgttagctttattttttgctcagcttcttctgacttctttttctgtttatgtttttaaaaaactgttaaaattatgttttaaatttttgtggctacgtagtaggtgtatgtatttatggggtacatgagatgttttgatacagacatgcagtgtgaaataaggacatcatggataatggaggatttaccgggtctgtactaccatctgggctgtgtcccattgctgtctttctggtattctggtatcttcctcagtgtgatatcagtgtctgtgacttgcgtgcattatttagacttgacatttgatttcctactcagcaacgtaatgaagacgaggtattttcctagtagcttccaaaccattgattgaatttgtggaaattaagaaaaaatacactttgacttatttttaagaagttacgtgagggccggacaccgtggctcacacctgtaatcccagcactttgggaggctgaggtgggcggatgacctgaggtcaggagtttgagaccagcctggccaacgtgttgaaaccctgtctctattaaaaatataaaaattagcccggtgtggtggcttgtgcctgtaatcccagctactcgggaggctgaggcaggagaatggcttgaacccagaagggagaggctgcagtgagccgagatcccaccattgcactccagcctgggcaggaagagcaatactcaatctcaaaaaaacagaaaaaaaaaaagttatattatatttttttaaaagtgctgttgcttagactcttaattcattttcttcatttaaagagattgatcatattgggataaagacgtgttttggaatccaaacaacctggttttaagtcccagaaccaccagttacctttgtgacctttggcaagtcatctaatttttctatttccatttcctcatcctactaatttctatcaccctgatctgttgtagtgaaaaatgatataatgcgtgttaagtgattagcaaattgactgacactaagtactcaataaataatggcagctgttgttattgctgttgtatatgcggtagtagttgtatttgttgttgattgttgccctaacagcaggccatgatttttcctaaatcctcattagggcttaactttgaactcaatttcaggccctatctatattaaaaattacctatttaatagtgtcattaggttgaatgtcatgtacagtgttgcatgatggattaatttctcataaatcacttcagtaatcatttttatgctttgaatagtaccttggtttacgtgttatatctgtgagaaaacacagcggaaatgtgtcaagaatatttccaggtactaatcctggttgttcagaaatgctcttctgttatttagtgaaagaaccgcttggttatccctctgtaatcctttatcttggaaataatcttttactgaggggtaaaaagattatagaatacaccaaaaaattcaccatccatgcattgacttagactccatgaaaaagaagtatgatacatttaaatgaactgagaatgataaaatttgcaaatgttcttgaagcatttatgcattcaagaccaataaaactgtttttgatccaggttaacagtcgtatcatactttaaggctgaatttagataaattgccaaaatccattttatcagtgatataaaactgctcagtgatagactgtgccctctcatagtgtcccagctattttttctaagagctttgtggtttgctgggctgctggtttcactacctacatgtagccacttgattacttatctcagtttgaattgcccaaatcatgcttccagaaacacacagagctcattcacctgtttccccataaaaatcatttatcatttcaatgaactttggcccccaaacacaggcattgcagagcatttcttgggatctagaatgtgcttagcattttatatgcactatctcatctaatctttccagcagccttacgtacgtatatttttatttttcttgttttatagatggggtaactgagatgcagagaggttaaatacccaagatcagacagatagtaaactggattttaaaatatatttatatattcagaagtatcaaggctattgctgtatacttcattagaaccatttctagtcagagaaattctacgagtagaaattatgactagaaattgtctccagaaatgagtgtctagagatttttctagacattgctggactaaaacagtcatttatcatccctgatttttttacctttctcctttctgctctttcaccttttttttttttttttttttttttaaaagagacggagtcttgctgttttgcccaggccggagtgcagtggcgctttctcggctcactgcaagctccgcctcccgggttcacgcctttctcctcctacctcagcctcccgagtaactgggactacaggcgccgccaccgcgcccggctaattttttgtatttttagtagagacggggtttaaccatgttagcgaagatggtctcgatctcctgacctcgtgatccgcctgcctcagcctcccaaagtgctgggattacaggtctgagccaccgcacccggcctcttccaccttttttaatgagcgatgtcttcaaggaacataggtgacaatatctaatacttcctaaatctaacaggcagtaattaagcctctgaagtctgtggataacgttgaataaatttgagtgtactcaattttgggggaaaaaaaaaaaacaaaaacagaatcgtttcatccattcactgtcatgcctctcatcgtaatcattatttgcccaatgtactgaagagaaacataaactactgtgataaagacaaaataggattgaagcataggaaaaataattagttccagttgatgatactggcatcttcattcatgaaacgattggggtctatctttcttataaatagatctataaagaacaaaaaccaactttcctagaaaatctcttcatttgatgccatgacatgtatgaagtgatctccaatcttaggtacaatgtaaaattctgtgatgataaaaacatattttggggtgctgaaacaaagcataagccactttttatatctttatttccaaattctcagattaaacatcgttttattttaaaatgtcttttattccaaggtctctatggaaaatatacaaatgtagaattcaggcaaatttcttttttcgtcggtttgcttagtctgaaattctagagccatttccaattttgttttacaaactgcagaaaaaagtttaatctcaccttagaacatatatacatatacatatcaaaataaacccatatgcacatctgaaacaaaaattgagacaataattgttagtattatataagtgacacagactactatttttctgtttaattttaaaatattcctagtcataacctactaacatgattttatgaaccatgaatggattctgacttacaatttgaaaaacaatagtctatctagacaaataattactcagatcttaaattcaaattttgattataattctgtatatatatagttgaattgatggatataaatataaaattttgcatagcttattcagatttgaatttatctttaagaaggctgtctttgaaatgtttttgttttatgcacatcctcagacaaaatatttaggttcagaatttgagtactagatgtcatgtccttgagtataagtatacaccttttaatattttcttccaaaattcaatcctgtgtaaatatcaataaatcataaagtgtttaatattttgattcaaattgcacagtgtaaagtattgtgttacttgagtattagtgctgtttacaatgcttcgtttggagaagattatttgaactcaagatagttaatgatttttaagaactcttaaatacgagctaggttaaggttcagatttcaaaaagagttaaataatgtttgctcttacacatttttgggggcgtattttcgacaataattttccatctcctgaaacctgaacagtgacttaagaaggtaatcttggggcaatttatgcttcaaaacacttcttatatatgcagaggaatttgataataattacagccgtaacatactttatttagttgttatacaaggtcactctgtgaagtgcattatgcactctttaattcttaccacaatcttattatggaagtattattgttcccattttacagaagcagaaactaaggcttatgcagggctaggtaactcccaaagtcacaagattccctttctttctatatcatcaatttcagcataagtggttggttcatataggaacataacaggagtaggaaaggatatgatagggtttcttggtcgtttgtattttcttgaaaaaattgccttcttgctgcatttgaagcagggtctggttcagataggaagcattatctcccagggctgccagcaaccttgtttactcagttatagacataacacacttacgccatattctttgaatcttactaaacttactgtgagctcaccagacttctgtgcttctagggcattgaaaatgctatatgcaaataggacagatacacatattataccacctgtctcctctgcgcatgtgcatccttcattgcacataggacttcacttctaaaacacaaattcaaaaataaaattatttacaatttcaggatagtatcagcagataatagaggcatgtgtttcttctgcgctcagggccctgtgcaactgctcaggttgcacaaacgtgaagctggttccacctgcgcacatctctcaggctgcctttatatcattttcccccttaatgctgactttgatagttattattaatagtatttagagacggaagagatacaccatggaagttgttctaacccctaagaccttcagaaattgccttactgttagacaagggttccatgcaaatagccctttcagtgcacttaccctctttgatatgatgaagttcggtgattttgacttaccaggatgacctttctctgccacttttatagaaactggaaaaagagtgcatcatttgatgaaaatgtcattgcaataactgccactatgccttgtcatctcgaaggacttaacagttggggaaatttaaaatattgaattttcaaaatttgagcatttatcagaagagcacaagtaagttggtgctggcagcttagtgggttaattcccagaactgagaaggacaggaaatgtagcacatacacaccaggggaaagccaccaaaggttgaattttctctgggtgagattatgaaatcccccaaacagcttctgttgttctacactgctttttgattcctttacaaaaccctgtttgttagggggccccgtgcttgcttgcaatatttgtggaatgcagaagattcttctacaaatatttctccaatatttgtttgttctgctcacctccgtaaatagtatgcctatgtccttgacctcagcaaagtccctcttgagcatgttctcaggatttttgaagcccggcgacctgcaaggagtacactcctcccaaagcaaaacctcctgcaaacttagtagtttactcaaatttttgcccttgataaatgcctttaggttaaagcagcagacatgtagtttatcccaagaagcctctcctgtcacttgagtgtatggttcctatagcatgcaaatctctgcaaacatatggccaggtttacagctcatgtaaactaccccgtctctattacttggcttcagatggggagaagttagagccacgcagagcgctccagcctctccagaggaagcctttctcaccagatttttctaatcgacctccttgcttgctcttacacacctttaagctagatattggattaagggttgtgagaccaattttgtgatcacttcttagcaattttttaacaggtaccctggatcttctctttagaattatggatgcttcgtacactttgctcttggctttagggtccagacggaaattccaagacaaccatttgcattctcacttaatatcctgctaattaaattgggtaaagcatacttcatattttagttcttctaagataatgtcttactatttaaatcgtggccttctggaaataaaggctaaatcacagaagtcattatgctgttagaaattttagatgggtgggtgaggtattttttttctttctaaattttgccttcctttcccctacctccttgttttcttactgatgcctttactggtctgtaaatatttggaaatatttcattacctagggcctctcaggaagagatatttcctttaatgccattgcagaggtatgtaaatataattctgataatgtatatgtaagttattataaataagaaatgaggaaagttcctacagatcaatatttatagcatttaaaaagcaacatgaggtgatatactaatttactccttccagtaatctagaagagctttaatacaatattaatttggtgtggattttgaccgctatttgaaaattgatgtatgcatgaggaagttaaaatgaaaactccctattgtctgtatctgctgttcctgtgtttgataatgccagtggacagtcctagcattttaaatatttcattcgattcatcatttaatgtactggaacaatctgcaaagacattaattgtgtaacacccaatttattttattgtgcagcatttggaagctcctgaagacaagtcatttggcagttcattgatggagagtgaagtaaacctggaccgttatcaaacagctttagaagaagtattatcgtggcttctttctgctgaggacacattgcaagcacaaggagagatttctaatgatgtggaagtggtgaaagaccagtttcatactcatgaggtaaactaaaacgttaatttacaaaacaaaacatatgacttgttataatggcaagtcatcctttttcctcaattactctcttacatccttgtattttggaaatttagttactatgatgtgcttgggattccaacagtcagattttgaagttttcttttggagagcaaccattgaaggcatttctacctgatcggccaacaggaatacgaaagcccaacttctttctcttgtgtcaaggcagtgctgaggcattacttacattcctgagttgatgtatggtattgggcttaacttctctcagtgggagacttttcctgagatgatacactcgtttggcttctttcccttccctgtcctttttcctccatcttcaactcccttgcggaacttcctgggagctcttccttaataaatcacttgcactgaagtccttatctcggggcctgcttctgaagaacttgacttaagataattttccttaattcatattaaaagtggttttgggattctgcaaatacaaattaaattccttttactgggaatataaatctaaatgggccacaagtttaaaactgcaaacaaataaaactcaaaaccacaccgatttacctagagttctaattacaattgttaacttccttctttgtcaggggtacatgatggatttgacagcccatcagggccgggttggtaatattctacaattgggaagtaagctgattggaacaggaaaattatcagaagatgaagaaactgaagtacaagagcagatgaatctcctaaattcaagatgggaatgcctcagggtagctagcatggaaaaacaaagcaagtaagtccttatttgtttttaattaagaagactaacaagttttggaagcttgtgattattttgatgtggtttgatggttaagttacgattctcagtttgttcccaaggcacacagctttctttcaagggagactggttggattttcatagaaataacattttggttttcacttttgtaactaaaagagcagatgttagatagatgcactgttatctacagaactatgttttaagatttgccaaaattctgtcatagttattattttctaggttttcctccaaacattaaaatgtcactataaaaggcacagaagcatgcacaggagattgtgtacataaaatcacctattagctatagttgacacgaaacttctcttctgaagaaaaagcccttgaaaatattaaagagttactcatctatatatggaaatcctcttgaaaaacattattcaaacgttttgggaaattcttattaaaatacagtatggctatgaattatcttaagaatatatattgacttaataaaaaagaggatttgagacatttctgaaaaatgacatatttcttataaaggtaacaagcagatctcatcattctggatatgtgttttgatttatattgttaggtgtgtatattcatgtaaagcctatcaagacaagatagatttatttttaaatgaaaagaaatgaagtgccaactgtggatttgaatacattaagtgaaaaaaattgtccaaatgccttaagtttatttaactattatttatgaagttcaaaagcgttaaaaaaaaaaaaggaccaaggaaactcattagatatgctagaaggattggtattccagtactaaattatagtgtgaaattatggaggggaaaaacacatttttaagctcaggccttttgaaagaataaataaggtacatgtaagatagaggtttcataactatatatgtattccaagccaggagatactaatctatgcatattgatattattcgcctgctgtgatcgtggtgatgattgtcactacccctagatgtgagaggtacaataatcatattataactgttgagtctgcccactccccagtgtttaccaggtccactaatttactccatctattatcgatattaagatataagctgccttctgtggtcatatgccaacattcttcaggttagaacttctatttgcagtgatctgtggaacttaaagcaacctcaaacaaaattagaaagttttgaaaatccaaccacctctttactgtccttgccataatagccaccagtgtcttctcctttgtgcactctaggtttccatcctctcctggaggctaaatgctctcatttttcttacactccccattttcaataaaactaacaatatggcattaattattcatactaatcagttaattaattgctgtgtgaaattgagttgcaagaaaatatgaattcctcctggaattaaaattgcaactttttctttgcttatctgaaacataaaaaaagtcttttatctgtgattctaacatttaaaaagatgttcattcaaaaattccccccttcaagggatgtctgccattaagtgaaggatgacagacacctagacttctgtgcgtgtaatttcctcatccccatcccactagagaatggaaatgctaaaatggcagtattaccacctagctgagattgacataaaaaattagtttgtccttagggaagattcaagagcttttgtacgtgttacagcttttagaataattattaagaaggcaaggagagccttctagctggtatagcttttgctaaaacatctcacagagtttttaaaatgagacacgtacatgtaaccacttctatcacatagacttttctggaaaattccttaaaaatgaatatacaaagcattatttgagcaacacaaattcagaaataatatgagagtttataaataacagtcttccttgccactttgactatgtatgtgttcgtgcataaaacctattaaattctaatgtgataagccattatgtaagctttgctgaacctgatttttgaaagattttgtgagaggaaacaaaaaacgtgattatgaaaagagggtattgtcattatttttaaaaaactaatctaggttttacttaatgcttcaaataaattataacctgttcagtttccattatcatggtcatgagaatggattatctccaatgattagcttcaacttggagcattacctattttttttctaaatatatgattacttcagagtagaagattactagtaaacaaaaatggattcatcgatacttcttttctctctctacctaagacagggtttggatagatccagtcggaagccattatttcctgcctaagccttggtttagcgattagagaaatgataattaacatttgtctagtcatattaagtatatccaaagctatgctataatttctaagttgatataacaaaagttaaaaacttcttgtaaatacagataagcttatcactaaaatctatgaacatttacacttagcaattattaatcctatctaccaacatacttactattaggttgctgcaaaagtaatcatgtttttttccattgtaagtaatgggaaaaactgtaattacttttgtaccaacctaatagcaacatcaaattatatttgatatatagtcattgtgagatatatatatatatatatatatatatatacgtataaaatacacatatatctctctatatgaacaaatattaatggaatacattatcaaaaacaattaatggcactggagactcaataatgatcatacaaggtctggccccagatctcatgaaacatattctgtagaggctggcagccaagaaaaaaaagaacacaagaaaaataccggataggaatatagtttttgaagagattaaaatgtaatgtgatagagaatggttgaggggaggctactttagactttgtgatccaggtaagactttgaaggttggtaccatttagtttgagatttgaatgacaagaaggtaccactatttgcagatcacaaggaagtgtggttcacggattaggaacagctaatgcaaaggcccaaaaatagggacagtttggcttgctggaggaaccaaaaggccagggggactgtagagttgcagggtggtaagttagatggctgaggtctgagatggggttgaaatataggtaggagactgattacatattgtagtgtcagtcagggctttgaataagggctttgaattctagactaagtgcaagacaaagccatcagattttatgtaggtgagagataggtcaagaaaacctatcaggaaggccactggaggaagagaggacagttattaggccagtgaagttggccagttaagacacagtagtgtcttagaccagctggtagttgtgataaaagtatactttactatcttagccatttagttattttaaaaaccacttctctgtttagttttagttcctatttttttttccttttgacagtaaaagtgctttttcctttggaaatagactgcttcaatttgtgcccacagttactattattcaagttgcatctaggaaataatatttatcccataaaccatcaacaattatgcaaaacaagaaatattaaaaatacaaagataatagcgtgccctgatttctgccttacataaaatcctctccagtttgcctaaggaataagggcttgctttctcaaacacttatttatgtgaactggggcaatatacttttcttttctgttctctactttatagttttgtaaaacagcaatagtgtcatgaggctgacatacctctgaaagatactagatgagatagggtataaaaagttagtttgtgaatgcaaaattattataaaatgtgaagaaagataactgtgataaataagatgatgagctgtcagttaactattttaccataccatgtcactttttatatgtaatttgatattttctatatgaagtattatataattttatatataattatatttcatatattttgtataataacttatatataattttttaacttttaaaaaaattttgcagggaatgaggtcttgttatgtttcccaggctagtctcaagctcctggcctcaagtgatcctctcccaccttggcctcccaaagtactagtattacagacctgagctaccaaacctgaccctcatagatgttttttactttttttctccagccttttctaattgcctcagtcatttttttttcccaaagagtatagctgtggttattttgtatggggataagggagcatgagcaggatgattagaaatacatttgcagttattttttcacaatggcaacatttaaaaatatgcttacaaaggaatgtcaggaaagataaccatacagatacttcctcctttctttctccttcataaccacactctcatttgattctttccttgctattgtattttccctccaattctgttgcttttatggacataaatttctgatgaggtaaaagctaatacaataaagaagtttattaacacatctccagtcacaaatgagtttggcacgtgccgatactggtcaattacaaaactttaccaatgtttatatgatttaaatgagaaaactaagtgccattcctttcataatgtagtgtttaaaacaagagaatattgatgtggttttgttagaaccccttaagaggagtaagccaatgattttttttttaatgctgtggaatacacttgggatggtaggaggtaaggaattcggaagaaaaacacacaacttccaactgtggaagtgcaagaagacaactggcacagggaaaacagaagattttcttctctatgaataaactaattaatttgattgaaaaatgcaacctgcagagagcaaaaaagatttactgacatttttataaggactcaaagttaagcacagcaagttccatcaacttttctgataattgtagttaggacatgcaggcagaaactaaaacttctgtgacggtaagggaaaaaaatgaaagcaagtcaggaggccaagtgaagttgtgttttttggtttatatcagcaggaggagagatatgaatagtatctgggtagatacacaagccataatatggaaaataattgtgaatcaccatcaatgctttgactggacagaaaaatacatctaacaaatatggctcatctctttttttttcccccaagtgtctatttgactctggaaataagatggcatatgtgagagtggatagagaaaaggaggtgctgaacaaatgagtgggttattttctcccaagtgcagtgaagtttgcgtatgtgaatatatgaatgaatagatgaacaactaaattaagttattcaggtaattccaatcttggaattgaattcgttgcagtaaatactttggaggtgcacaatctcaaactcctaattgtgattttatttcacaatttggtaagttcattgatttttctgttttacttcttccagtaatgttaagcaatagtaacttgcagatcaaggtggtgtaggaccagtagcatcagcgtcacctgagaacttgttaaaaatgcagactctcagctctcattctgatatatacagaatcagaattgtgcagtttagcaatatcccaggtgatccctgatcagtttaagtttgagaagcactgatctaactgaaattaagacagagtagaaatctcaacttctttgtaaacctctacttagatatcttctgttcctatttttctatcaagtgacgtgggccaaatattttaattactttctcaggagctctaaaaatggtgctgatatttcattcagtcctcatatgttgatatcataccccatgggtgattaagcagtagcaagattctggtgcaataatatataacagacaatatatgagtgttgatgagtattgataattaagctattggactaataagaagtaggaattatttatagatgataacgtgacattcggttaggttgcacatggattatggtcataataatttttctgtcaataattaaaaatgtgataatgcagctaaatgtggacatctcttgtactaataatacaatgcatgtgactcatagtttaaattacaggaaagctaaatttctggaattcacagaaatgagagagccgtatcttcaaaaacaatgctttctcacaaagataaataatgctgatatggtttggctcatcttgaattgtagttctcataatccccatgtgttgtgggagggacctggtggaaggtaattgaatcatgggagtgtaaccctcatgctgttctcatgatagtgagtgagttctcacaagatctgatggttttataaggggcctttccccttttgcttggcccttcttcctgctgccatgtgaagaaggacatgtttgcttccccttccatcatgattttttctgaggcctccccagccatgccgaactgtgagtcaattaaacttgttttctttataaattatccagtctctattatgtctttaattagcagcgtgagaacagactagtacagtacattggtaccgcagagagtggggtgctgctataaagatacccgaacacgtggaagtgactttggaactgggtaacagccaggggttggaacaattcaaattaaactaatagactatctcagagagcagatttaatagaagttgacattttaatcttagtacaaaaattcccaatcagaaatatcaaaactatgtcttgttcataattaagttatactacttatacattgaagaaatatttattgagtgtgtagtatgtgccaggcactgtgccagatgctatgtagtggcaaaatttttgaagttgagagtgagcttctatttccacataaatgaatagaatttcagagtgtcaacattacctattcttactagagataatttaaacagtcttccaaacgtgatatattcatatttgtccttggctcctgatgacatctgccaatttctttattttctttaaaagcatttaatcaggaagattgatttgagggttgccataatgtatttgccacaagaatctttttctttttctttttcttttttttttgagacagagtctccctgtctcccaggctggagtgcagtggcgctatctcggctcactgcaagctccgccccccgggttcacgccattctcctggttcagcctccccagtagttgggactacaggtgcccgccaccacgctcggctaactttttgtatttttagtagagacggggtttcaccatgttattcaggatggtctcgacctcctgacctcgtgatccacctgccttagcctcctcagcctcagtgctgggattacaggcatgagccaccacgcctggccaagaatcttttgcatccagccacgcagcttctttatgttattgttactaaactgaatttatgttttcaaaatgaaaataaatgtgtttgcatttgaactttaatgttgcctcggatagttgaaaaatattaataattaaactgttcagctatatggatggaggacaaaaatggatcaggatttgaaaacaatgacacattttcgattttctcatagaattcagtataaaaacaatactatttctcacattccattaagtaggaaaataaatgttagtgcatgtttaattttgtgaaaaactggaacattttccttcatttctagttgttggatggggaactttatattaggttctttctgaactatttactgtgaggttgtaatttaaagtttgacctccaagatcaggttgcagggtgcagtataataactatggcaattagtgggaatttttgaaaatgatacatgacatgctctccttggcttctttcctagcccaagatgtcagcatacttcgtgttgggaaagaaggtgctgtaaagaggagaatgaacacattagttttagggggataaaaactgtataattttgtcagaccttgcctcacttcattctccaatggaaactactatattagtgcctaagatttatacacaccgtgacaccatgcagtgtcaggctttgcagctgagtctagtaaggaataccagaatttggaggaaagcagatctagttactgaggcaagtaggtaaactaggccagtagggtttctacagcttcacagatgctgagggtacccattcagaaagttagcatgagaactagaggacaatagcgatggatgtacttgtggtaaaggtgatgagatagtgaaaacagtgacagctgaagtcttacacatttgagggggtaattggttctgtttggattctggctttaaagcttatatttcacaggccacttattgaactttgataaacgttataaatcttgggagttgaaaaatactaatatgcttcctatggaccattcattattgccatgcaacaacaacaaaaaactatgtgcatatgtttgtacatgcactactcaagcttttcttttaaatgaatgttgcttttctatattaaaacatgtttgccatttcttggattataatatatcatgatttctgattcctatatttaatgatacaccatacattttaaaaatatctagtcattttatatggtcaccatatatttgagggaaaatgagtctcgaagtttattgtggaggaggtggagaaaaatcgccaaacagaagcctccagtaattatccctgttgcaggaacatcaaattgaacaactgtccacactagaaaagcaccttcataagagtgaaaaattaggtgcatgatcgtagtacctggtttttgggttgtatcacagaaagaggcacagaagagggtagtaaaggcaatattctatcacctataccagctctccctcatccatggcagcagtcacatggcatgaagagagagtctatgtgcttgcagaagggagattgcagtgattataggactttgcattgaaaatcagtgctgccctgtcacagtggaaaccgacaaagaacagaactcagccaaatcccgcagagggagcatttagatgaaccctagacagggaagaatcatccatcccagtgtttggaacctgagttccggcaagccttgtcatcatggattagagtgctctgtggttctaaataaacttcaaaggtagtctaggccacaaggactgcagttcctttgcaagtcctggtgctgtgccgggctcagagtcagtggacttgggatacatacaacctagtgagacatccgctggggcagctaagggactgcttgtgcttcccttcccccaaccccaggcagcacagctcacagctccaggaaagactccttccttccgcttatgaagaagagaggagacaagaaagagaactttgtcttgctgcttggataccagctcagacatacaataggatagggcaccaggcagagtcttgaggtccccattccaggccctagctcacagataacatttctgaacacaccctgggccagaagagagcctgtcaccttgaagagaaggaccccgtcctggcagaattcatgacatgctgaccaaagggacctagggccctgaataatcagcagctgtagccaggcagtacttgctgtgggtattgggtgagactcagagctgtgatggtttcaggtgtgacccagtacattcccagctgtggtggctacagggagagaatccttctgcttcaggaaaggagaggtgagagtaaaggggactttggcttgcagcttgggttccagtttgaccacagtggggcagagcatcaagtgggctcctagggtccctgattccagagtttggctcctggattccattttcttactgccctgaagggagagactcaggactgacagcattcaccacaggctggccaaagtggccttggcccttgagtgaacattggacctcagacagtactctctttggttcagtagtcgtcgtggccatgaggagagacatctctgtttgtggaaaggggagagaagagagggaaggactttatcttttgggtggggtgccagcttagccacagtagaatagagcaccaggtagatttcttaggttcttgagttgatatagtttggacatgtgtgcctgctcaaatctcacgttgaattgtagtaatctgcagtgtttgaggtagggcctagtgggagctcattggatcatgggggcaaatttttcataattggttgctactgtccttgcaatagtgagtaaattcttgcaagatctggttgtttaaaagcgtggcaccctccctctcactcttgctcctgctgtggccatgtgatgtacctgttcctccttcaccttctgccataattgtaagtttcctgaggcctccccagcagctgagcagatgccagcatcatatttcctgtacagcctgtagaactgtgagccaattaagcgtcttttctttataaattactcagtctcaggtatttcttgatagcaatgcgagagtggcctagtacagaaaattgttaccaagaagtggggctttgctgtcaagatacttgaaaatgtagaagctgctttgaaattgggtaacagacagaagttggatgagtttggagggctcagaagaagacagatgagggaaaatttggaatgtcttagagactggttaaatgattgttaccaaagtgctgatactgatatgcacagtgaagtccaagctgtcgaggtctcagatggaaagaatgaacttattggcaactggagtaaatgacatgtttgttatcccttagcaaagaagttggctgtattatgtccatgctctagatatctgtgaaagtttgaacttgagagtgatgatctcgtgtgtctgacggaatgaatttctaagcagcaaaatgttcaagacgttgtgtggccacttctaacaacctactctctgatgcaggagcaaagaaataagatggaatatttattattttattttattgtactttaagttctgagatacatgtgcagaacgtgcaggttttttacatatttatacatgtatatttaaaaggaaagcagaccataaaggttttcaaaatttgcaacatggatatgtggtagaaaataaaagcccattttcaggagaactcaagaaggcttctgagcaaccacttgctagaaaaatttgtatacctacaaagaaggcaagtgctgatagccaagacaatggggaaaaaggcctggaaggcatttcagagatctaaaaggcagcccctcccattatagatccggaggcctaagaggacagaatggtttcctgggccaggcccagggtcccagctgccctgttcaacctcgtacactgtgcccccgccccaacccctcccccccgcacccagcgtcctggccactgtagctccagctgtggctcagagtggcccaagtacagcttgggccacagctccagcgggtacaagccataagcctgcaggtgcacagagtgcaagagttgaggcttgggaacatccatctagattttagaggttgtatggaaaagcctgggtttccaggcagaagcctgctccaggggcagaaccctcacagagaacttctcctggggcaatgcagagggaaaatgtgggctttgatcccccacacgtagtccccactggggcattgcctagtggacctgtaagaagagggccactgtcctccagactccagaatggtagatccactgacagcttgacccttgtatctggaaatgaaacacacactcagcaccagaccataagagcagctttggaagctgaaccctagaaagccacaaagttggagtctgcccaaggccttgggagcacaccactcccaccagtttaccctggatgtaggacatggagtcaaagcagataattttggagttttaagatttaatgactaccctgctgggtttcagacttgcatgagacctttcttttgaccaatttcacccttttggaataggagtgttgactcaatgcttataatcccattgtatcttggaagtaactaattggtttttgattttacgggctcataggtagaagaaacttaccttgtctcagatgagactccggacttttgagttaattctggaataagtaaagaccttgggggactgtttggaagacatgattgtatgtttaaatgtgagaaggacttgagatttgggaggggccaggatggaatagtatggtttggatgtatgttcttgcccagatctcacattgaattacaatcctcactgtcagaggtggggcctgggtgggagccgaatgaatcatggcgttgaatttctcatgaatggtttagcactatcctcttagtgctgttttcatgatagtgggtgaattcttgtcagatccagttggttaaaagtgtgtggtaccctcccactcacctcttccctggccgtgtgacatgactgctcctccttcgcaatttgccatgattgtaaatctcctgaggcctccgcagaagcagagcagatgccagcatcatgtctcagggacaacctgcagaaccatgagccatttaagcctcttttcttcataaattacccagtatcagatatttctttatagcattgtgagaatggcctaatacatgaccccaggccctggcttacatataggatcttgcaaacccaccagggaaaaattgctaccctgaagtgaaaaacacaagcttcattggatttgccacctgccgattgtagagtccttgggccctgagtgaatgtaggtgatagccagtcagtggtcagtgtgggccttgatcaagacccagtgttgtactggctttaggagtgacccaacacaatcctagtcgtggtagctacaggggtgcttgtgtcacctctcctttagctccaggcagctcatcacagagagagactctctttgttgaggggaaggaaagagaaaaagattatctaccaggtaatacaggggattttcctgaatcttcccaaagatcaccaaggcagtacgtttaacagtctgcaagagtcacagcattactgggcttgggtgcaccccagtgcatatatggctgcagtgaccaaaggaataaatcacaacacccaagaacctttaaatacctggaaagccctcctgagaagtatggatacaaacaagccgatactgcaaagactacaataaataccaaagtcttcaatgcccagacattgatgaacatccggaagcatcaagaccatccaagaaaacatgatctcaccaactgaactaaataaggcatcgctgaccaatcttggagagacagatatgtgacctttcagacagagaattccaaatggctgatttgaggatgctcaataaaatccaagatagtacagagaaggaattcagaatcctacacataaatttaacaaagggattgaaataaaaagaatcgaacaaaaattctggagttgaaagatttaactgacatactgaagaatgcgtcagagacgagtaacagaagaattgatcaagcaggagaaagaattagcttgaagacaagctatttgtaaatacagtcagaggagacaaaaaagtcctaaaaagtttattgaagagggtaataacacagaacttcccccacctagagagagagattaaaattcaagtacaagaagataatagaacaccaaggagatataatataaataagactacctcagggcatttaaaaatcaaacttccaaaggtcaaggataaagaaaagatcttaaaagcggtaatcatataaaaaaaaaaatcacatagaaatagctccagtatgtctggcagcacaattttcagtggaaaacttccaggccaggagagtggcatgatacatttaaagtgctgaaggaaaagacttttattctagaatagtatatctatgaaaatcctcttcatacttgaaggagaaatgaagactttctaagacaaagaaaagctgacagatttcattaacaccaaaccttttctacaagaaatggtaaagggcgttcttcaatcttaaagaaaaggatgttaatgagcaatgagtcatcatctgaagtaacaaaactcactggtgatagtaaggtttgttactattctgttacaaagagaatattataacactgtgattatgatgtctcaactacccatatcttgagtaaaaagactaaaagacgaacctatcaaaaataactgcaacaacttttcaagacatagacactataataagatataaatagaaacaacaaaaagagtggggggatgaagttaaagtgtagcattttttttttttttagttttctctttgcttatttgtttatgcaaccagtgttgtcatgaatttcaaataatggattataacttattctttacaaacctcatagttaccacaaatcaaataatgtactcaggtacataaaaattaataagaatgtataacatatgaccagagaaaattactttcattaatagtaagacaggaaggaaagagagaatgaagagaaggccacaaaacaaccagaaaggaaatagcaaaatgggaagtgtttaagtccttaacgtaccaatgataacatggaatgtaaattgactaaactatccaatctaaatacattgagtgacagaatggataaaagaatatacaagacacaataatctgttacttacaagaaacacacttgaccaataaagataaagatagactgaaaataaagggatggaacaagtattccatgccaatcgaaaccaaaaaagaacaggattagctattcttttatcagacaaaataggtttcaagacaaaaactataaaaagggacaacgccggtcattgtagaatgataaaggggtcaattcagcaagaggacataacaattgtaaataaatatgtacccaacattggaacacccagacgtataaatcaaatattattagagttagagagatagaccccaaaacagtaatagccggtgatttcaattccccattttcagcagtggccagatagatcatccagacataaaatcaacaaagaaacatcagacttattatgcagtgtagaccaatttgaactaatagatatttacagaacattttatccaacagctgcagagtacatattcttcttctcagcacatggataattttcaaggacaagccatatgttctgccacgaaacaagtcttagaaaattcaaaaatcaaaataacataaattagcttttctgatcacaactgaatatatcaagatatcagtaggaagaattttggaaactatagagacacatggaaattaaacaatatgctcttgaattatcagtgggtcaaagaagaagttaagaaggaaactatagaatttcttgaaacgaatgaaaaaggaaacgcaatgtaaccaaaacctatgggaagcagtgaaagcagtactatgaggaaagtttataggtataaatacctacatcaaaaaagcagaagaactttcaaataattgaatgatacaccttaaagagctagaaaagaaggagcaaaccaaacccaaaattagtatgagaaaataaatattacagtaaggaacagagctgaaatacattaaagtacaacaaaatgatacaaaagatcaacaaaacaaaaagaaggtttttttgaaagggttgacaaaaatgacaagtcttaagcttgactaagaaagaatgagatccagtcacttacaacaacatggatggaactggaggacgttatgttgattaaaataagcccggcacagaaaaacaaactttgcatgttctcacttacttgtgagagcttaaaaaaaaaaaaaaaaaaaaaaaaaaaaaaaaaaaaattaaaacaactgaactcatggagatagagactagaatgatggttaccagaggatgggaatgctagtgggtcgggggcagtggggatcattaatgggtacaaaaatatagttagattgaatgaatgtgatgtagtatttgatagcacgacaggatgattactgtcaaacataatttgttgtacgttttaaaataacaaaaagtataattggaatgtttgtcacataaagaaatgataagtgctcgaggtgatggataccctattaaccctaatgtcatattatgcctgtatgcctgtatgaatatgtctcttgtatcccataaatataaacacatactatatacccaaaaaaataaaaatttaaaaaatagggtattgtggtttctatcattaaagtaaacatcatgctaagaacaattgtctcaagagtaacaactgtaattttcgttttggtgaaaataataaaattattaatgacaatctctgtataaaattccaccaaatgaacttctgttttctatttttttaatatttataatcagtgccataaatgactttataatagatataaagttaatctctaaaaagttaattttagttcaggcaatattgcatgattgtgaagcaggccccggagccaaactacctgagttcccactttgtcaccttcccttgtttgcgttttgacccaagtaagcctttgtttccccacctgtaaattggggctaatatcagttgctgaatcaataggattaattacaataatacctctttttttctgacacacaattattattttgtatttaaaaattatatttaaaagccccaaattctacaagatcaaaattactctttagtaagtcttcttttttatttgtaatttctgggggtacataatagatattttagtacttgtggaagtcatttataaataagtaaacgcatgtttgtgcatcctgatcctttgtctccatgttacctctgtgcatctggttcatgttaaccctaacaagtcatgttgtctggatacagctttccaggtatttgccacttgtgaggacccaagggctaaagtaaaaattatggctgtgtcctggggcgggggggggggcggggaagaggcacaatcgttctcaaccctggatgttcattcgaattacctggttggatagttttttacagaaccaatacctgggctccattcccagatattctgattgaattgttggggaatggggctgggacgtcattttgaaaagttctctcagtgattctaatcaattagtacctttttatattaaggcattatttatataaattccactaattcacctatctgtgatagtttgaataaaagccggacttaaacattacctcaattaataactttctgttttttaacctatcttggatttcttttcttttttctctccctcttttattattattattatactttaatttctaggatgcatgtgcacaactcgcaggtttgatacataggtatacatgtgccatgttggtttgctgcacccatcagctcatttacattaggtatttctcctaatgctattccttccccagcccccaatacctttcttaatagagaatgaaacaaaagctgaaacaaagttgattttaaaaattacttatttaagcagatgacagcattctagaagcatctagttgcatataaagaattgttaagctaaaaccaaaactaatctatctataagaaccaccttgctagaatttttgagccatcgttttgttatttttatctatttttttaagacggagttttgttctttcacccaggctggagtgaagtggtgtgatctcagctcactgcaacctctgtccccccgggttcaagtgattctcctgcctcagcctcctgagtagccgggattaaaaagtgcttgccaccacgcccagctaatttttgtatttttagtagagatggggtttctattggccaggctggtcttgaactcctgacctcaggtgatccagccacctcggcctcccaaaatgctgggattacaggcctgagccactgtgcccagcctgagccatcattttgaataagtaaataaatcaattccaattttcatcagtacaattttagtttctaaatggcgtgcatttaaaagtaaaaacatgcattaaaaattaagtttctctaatttgtactggtatctttcccttaaatcatattatacaggttttatttctgacttaaatcatgtaattgtattttacatgtaagacatgtcaattgaacatcactggtagttcttttctaatctagactttcattataatacattacctccttttattaggtgtatttttttaaattgaggattgcatatatgccagtaactgtgaattctagggaattgggcctgagagcctgtcttcctaaagagctcacacctcttggtaatttgtaagttttaattgtagtcctctaggttttataaagtctatccatttatgcctttattagttagtgcctagcatatgattatgttttcataatatatgtttatacattttataatgtatttccataaagcacaaaaaatgctattaggaccatcaaatacaggctgaaattaatgaaaacatgtactattttgcatttataaatttgtatatggaaaatgaaaattttaaaaaatgctattaatgtttattgctagattgctaaacttaggatgtcattcctcatagacattggaggacaaaataaattggtatggataagtacttgcaaataaggattcacggatattggtaatctaattatctgtcggtttatagctgtgctgtccaatattgcagccgctagctatgtgtaggtaaattataattattataattaaatatagttaaaaattcagtttctgagccttactagccatacatatttcaagtgttcattattcccacctgactagtgtccattatatatgtatacctatagtgcacacatagaatatttacatcattttagtaagttctggacaacactggttaaagaataattgccttcctacattctttcttttttgttttttgaaacggcgtttcactctgtcactcaggctggagtctaatggtgcgaactcagctcactgcaacctccgcctcccgggttcaagcaattgtcctgcctcagcctcctgagtagctgggactacaggcatgtgccaccactcccggctaatttttgtatttttagtggagatggggtttcaccatgttggccaggatgctttcgaactcctgaccttgtgatccgccgcctcagcctcccaaagtgatgagattacaggcgtgagccatcgcacccagccgccttcctacattctaacagagtttctgtaaagcaaagctggcattcccattgaattcctttatgttcatacagatacgttttcatgtccgggggtgggatgacagctctcgagtaaaatcatttgaaaaatactacgtcttagaatgccatttactgcaaatgacaaaaaggccaactcaaagtgacttataccattgctccttaaaatgtgattaatggatccgaagcattgatatcccttgggcagttgttagaaatgcagaatctcaggccccaacccaggcctactgacttagaatgcatagtttgacactctccaggtgattcatatgtacattaaagtttgagaaacactgggcacaatcataaggatgtctgttatctaacaatatatcaaaaatgtcgttgacgctagagaccattaggtctgtaactctatgttgccaaagttccaagttcttacaacttatctgttttgctagcccctctctattctcagatgatctgaacgattggaagtttaccgtagcagttcctagtatcatgtcctgatatgcttttgcctatacctactgtcaggaccaactcctgccctatactactttattctaattccactccctcggctctctattgccagtcatatatgtatactccattcaccttttgcttttactttcccgtctaaatgacgacttgaaggatataaaatgaaacctggaaaaatgcaaacattttttcctatctgtgcatggtagatttttattttgtgactttgacaatttttccaaatttatttacatctttagaatgttagctggaaataagaaactcctgtctcattttcatcatgttttaaattgaactatatgaagccattttcatcaacaaagaaattgaaatatcagaaatttcatatgatctaatacaatattttgcccatgaaaaaaataaaatagtgcacagtcttgggtcacacagggtttgtgatttctatactggcttcacatgccactgtgccagctctttaacctaccactatcctcagaaataaaataacagtagctaggtgcggtggctcacgcctgtaatcccagaactttgggaggtcgaggcaggaggatagctggagaccaggagttcaagactagcctgggcaacatagggagaccacatctatacaaaaagagttaaaaatttgccagggaaggtggtgcacctgtagtctcagctactcaggaggctgaggcaggaggatcatttgggcctgggaggtcaaggcttcagtgagttatgattgtgtcactgtactcgagcctgggtaacagaatgagaccctgtctcaaaaaaaaaaaaaaaaatactagtattataaatctttaccttggcaaggttatgttaaaaaaagttgaataaatgttagccagtgtattttacaactaatattaatgacattttaacccagaggttaacctccccactccctgaagtcacccctttatttaaaccatctttgggaaaaaggacatttgtgtcatgaaggctgttaaactcaccttctgatatcagtgcctccttcaattttgcttcttcctctggttcagccttgcaatggaccactactcacttccttgctaatcacccagaaaactctggcctataattcacctgcactttactgatgctcttttcacaggcctcagtgaaggaaggaagcgtcctcttcattactagttatttcaatctttagagtttttcacatatcagtactgtaataaagcccttccttactttactgaagggcatacttgggcattctgagtctgataccctttgatacttccctgccagtgtcacataaatctatatcttctgagttttagcagtagtaactaatagatcgaacacataccttaagtagactagcagtggttttcaaataaataatattcttacctggaatgttgtcattcaaagtgtgatccatgacccagcaacattggtttcacctggaagctggttagaactgaattcttcgacccaaccccgtgaatttaaatcagaatcaccaggtgggctgtatccatatttaagtttgagaagctgtgatcaagaccccggggggcaccaaatccaaatgcctattgtagaagccagaaacataacataaggaagtgagatgagttgcgtataaaaaaggatagggagtgatgaggactacagcaaactggagagcttatactttgtatatgaagtataattggatgcgaagtataattggatgtgaagtataattgatactcaattttgtcctataggaaggaaggtttagggttgctgaatcctattaaatatgatcaagagtggtcagatttgatatttgtagctaatatctcaaattttaactactggcaaaaatttcaatttattttcaattagtatgagaccaaatccagcatatggactactatttgctaatatctagtcaaggcctgtagtaaggaaaagaaatattttctcaattaaaacatctcagaatcctttccaacaatgggatgaatgctttttgttttcgtgcttattagtatcacacctccacaatccttaggttcttctgttttcaaacttgttctgaggttaatttcatgcttcagacacatgaaatcctgctttttggagcctcaggtagaacccattctttggcagttggcagtcacacttctctctgtaagtggaggtgaagtcaggaagagaatgtaaaagtctcatgtcaaaataattcatagtaatctcctggggattggcagttgtcctcctattaatgttaatatcttggtctctgcagaatttgggtgagttgtgtttgtagaataaagttacctagagcagtaattttcaagtgtgagtatgcatcagtcacctggaagtcctgttaaaatacacatttctagacctcatcccagagtttctgattcagtaagtgtgagtcttgcacacacttctagcaagttttgaatttgcacttctagcaagtttctaggggatgggctgatgctgttggtccagggtccagtaaccacactttcagaaccactaatgaagagagaaaaagcagggctctatttggctgggagacattgatgtgactgtaccagtcattaaaatattgagccatcccgtttgcacacacccagccattctggtccctaccccaaaaatccccaaccagatgtttctgtatcccacttataaagagaaaacacctggctgggttcggggactcgcgcctataatcccagcacttttgggaggccaaggggagaggattgcttgagctaaggagttgaagaccagcctgggcaacataatgagaccttgtctctattaagagaaaaaaaaaaaaagaagataaaacacttatgtgtacatctcttcttattggtcaatctctgagtccaagtttgtaaaatgaaaccacgatagaacatgaaagattactgggtgttcaaatttcagatttggggcagagctcaagaaatctctgtggacccacagattaaggtaggctatgatactgtacaaccatcctgcaccttgtgcgatcaagctgcactggatttccggttcctctgtgatgtgacagggcctttcacaggtctttctttccgtctagaaagagtttataccttctttttcactacttctgacttcagtcttcacagttgtccagtactgcactaaaggcccccctttacagactcaattcaattgctctcatttcatagtatgatcacattataaccaactaatggcctgttgagctatatgtattatctgtggccctcacccgccatccatataaactccaagatagcaaggggctgtgttggtcttccttgcctctccatccgtagtatccaggtactcaataattgtatatttcgtaaattaatgaatgaatttttcaagtctcaactcttaggctgtgtgttctgcgaggacactgttcccaatgactgcaggtcaatttgtatcctctccttactccctcaggaatgtatataaatctaattataatggatttcttatattctaattatttttgtatttatgtctctaatagtctctaagctacttgaaattgaagataggtattttgtccattcctaacaaatatgagtttcctgcatagatatgaaactcagtaaagatttgttgaaggaaatgtctgtccaaaagcaaaaagtaaatgatgctttcaaatactagcaactttcagtttttgcttccacttaaatggatatctcatctctgttgtttctcataaaaataaaatgtctactttttgtgtttgataaatgaaagtttattctcataacttctgattgcaatgttcctcatggtaaatgtgtctctaaaatgttaaaagtcaataaatagtgcaatctaaattattgtaaacactctcaaaaggaatatgaaatgcatattggaagaaagctctgataacaaccccaatacttcggaccagctatggagccattatcttttatattttattttactggtttacttcccctgtttccctgtaattttatatgaagagtgtgagtggtatgtaacattacatacaggttccatgttggggtttaaatagcctggcattagtgtatgaggataaagatgctgatggaattttgtatccttttgttttaaatacacttatactaatttaagtattttgatagttactctgtttagcagattcatttcacttttctccttcttgctctgttcaaagaggatgaagtctagattttctgttacccaggttcctcttggcctttggttgctaaagtacttcagccaatgggaggcactggcaagagggtgaaagcagagattgtggtacttttctcttcctcttctgtttcttactgtggagtggctggaattgtgttcctcttaaactacagctactgttggacagctcttgttccatgtctctaattctcactgagctccggcaacagctctcttccttttttcttccagttccggggatgctaggtcagttgtctttgttgttaggtcctggctccttcactatcgtttattatttttcccccgacccttcacataaatgtgtaagtagtctactgagcgaaacatatttgagtgtgttctatctttcctgccaatagtatgcagcatccacacacacactcaacagacccaacttttatattttattgtttgaaatgctatcaatttctaaacattgctttttaaaccctactttaaattgacagataaaattgtatattcatcatgtacaacgtgatgcttctgagtaaatatatattgtggaacagttgaatctagctaattaacatatgcattaccttacatatttatcatttttatggtgggaatatttaacgtcctctctctctacatttttcaagagtatattttcattagctgtagtcaccatgctgtaaaatacatcacttgaatattttgactgtgactatatatcccttgaaaagtatctccatacctcccccttccccataaccacctcagcctctggtaaccactattcattccctacttctgtgggatcagctcttttagattccacatataagtgaaattaggcagtggttttctttctttactggcttatttcacttaacataatatcctccaggttcatccatgttgttgcaaatgacagtattttattcttttttatggctgaatagtattccattgtatatatgtataccacattttctttatccgttcatatgttggtggatatttggattgattccatatcttggccatgaatagtgctgcaataaaaatggtagtgcagatatttctttgacatactgatttcatttcctttgtatatataattcatagtgggattttgtatcatattgtagttttgttgttcatatttcaaggagccttcatactgttttccatgatgcctgtactgattgccattcccatttacagtgtgtaaaggttttcttttttttaattagtaatttttaacttttgcaggtacgtaatacatgcctttttcctaaatcgttatcaacatttatctttttttgttttggatagtagccatgctaacaaaagtgaggtgataatctcttcttttttcttttgacaaagatatcgttaattactattatattttaacttttaggtgcaagggtacatgtgcagttttgttacatgggtaaacttgtgtcatggaagtttattgtacagattatttcatcaccaggtataagcttagtactcattagttattttttcctaattctttccttctgccaccctccaaactccaataggccccatgtctgttgtttccctctatgtgcccatgtgttctcatcatttagctcccacttataagtgagaacgtggtgtatttggttttctgtttctgcgttattttgctaaggataatggcctccagcttcatctacgtttctgcaaagaacataatcttactctttttcatggccgcatagtattccatggtatgtgtttaccacattttctttatccagtttaccactgataagcatttaggttgattgtctttgtgattgtgaatagtgctgccacgaacatatgtgtgcatgtgtctttttggtagaatgatttatattcctttaagtgtatacacaataataggattgctgggtccaatggtagttctgttttgaggtctttgtggaatcaccacactgttttcaacaatagttgaaataatttacactcccacaaacagtgtataagtgttcccttttctttgcaagtaagctgatacctcattgtggttttaatttgcatttcccagatgattagtgctgttgagcattttttcatatctgtgttatccatttgtcccttttatgataaatgtctattttggtcttttgcctatttttaatcaggttatttgttttcttgctatggagttggttgaatttcttccatatttttatatgaacccccatcagatatatagtttgcaaatatttttctcattctattggatatctctttactctgttaatttttaattttaattttaatttttttgctgtgcagaaatttttagtttggtataagtcctcagtctatttttgcttttgttgcttgtgcttttacagtcatattcaaaagttattgcccaaataattgtgatgaagcttgtcctctatgttttctactaatagattgagagttttgagtcttaaatttaagtttttaatccatttcaaattggtttttgtatgtggcaagggataagggtctaatttcattcttctgcatgtagattcttacttttcctggtagcatttgctgaagagggtgtcctgtcctcacggtgtgttcttgacacccatgtccaaaatcagttgaatgcaaatgcattaatttattcctgggttctctattatgttccactgatcagtttttatgctaatacaatgctgtcttggttactatggcagaatttcttctagttgcgtactttgaccttagtgggaaataaaaaacatccttccaaagaaccatattattagtgtttccatattgatcgagtatcttctgttttttttattggttaacactatcatatatgggtatactaagagactcctggcaaatgcccatagttttctaatgtagtactacttgccccgcattgtattgggtgaactcagttgaccatttgtgcttaggttctgtatggtaacccctttctctgtctgtggattcagcagcatgaggagccaaacatgaacagcggtcatctcaacttctagtttaaagaaatcatttttgagtttcttataactcaaaatgttgaagaggtagttcaaaaaaaagttgaagaggtagttcacagataaggaacagaagtcacaaggtggagagagatggataaattaatattaggttaatacagatgagataattatatatagaagtatttatgggtgagtacacactcacacatccacttctttatgtcaacccagaggtcctgtaagctacaacaccctagaagcaaggagcatacctagcaacaggatcttgggtttcagtaacattctttaaagaaaaaaaaaaaaaaaaaaaaaaaaaggaaccagaacactgtggagaaacagctgattctaacactaggaaagggaatatagaaaatgagcctggaacatttggtagtgccagatagtaagaacatgctaaactccacggtctcgctctaaacaaaaaacactgatgggatgtgtcaaagaagccaactaagagacttcccaatgtccaaagctggaactatttgagcaaaaatccaaagcaaaaactagtattggatttagcccaaagtatcaaataactatacatgagtccatgctatgtaaataaataatttcataaataaatggaggaatagagacaaatctccaatgcagaaaaaactccaaaaacttatgtaacttctctgccctcacggagagggaatgtaactccccactccacaggggctgtgtatagtgactttcttattaaaaaacagtgtgaaaagagggggaaagagtaactttatagtggataaacatgacacctattactttagccaggtggtcacatttaacattgataagtcacgttgagggtatatatgctttataaaatgtgcttaaaatggcccattacttctgtggtctttcaaaaaccccagtttaattatgaggaaaaaaaatcagacaaatccccactgagaggcatactacaaaataccagcctggccagcacttttaaaaactgccagaaaaattctgagaaactgtcatagccaaaagcagattaaggaaacaggacaattgagtgtaatatggaatccttggagagatactgaaatacaaaaaatagtttaaggaaatcagaatataataatagtctccagctaatgcacaaatattggttcattaattgtaagagatgttccataataacataagatgttaataaaacgggagactgagtgcaagttatatgataactctttgtattataatctcattaatttttcgtgaatctaaaacagccaaaaaattaaatctgttaaaaaacactctcagctatgtgtgcactttgtgtgtttaaatgtgatgattaatggaaacttccagtaaagattttagagtaaaattatgtattcaaaataacatattcctaattcaaattataagatcaatgttcagaatatagttttgaaaaatgctttaaacatgatgtttataaagagtatttcctttaaaataaccatcagcacttctcatttgcatctcaaattttggttgaattaatgaatgaacaataatgtgttttcatcctcaacataaagttgtgtaattaataggcaaaacattatcccatgtccctgatgctggaaatgtaattgagaacgtttaagaacctggttgtagagcttaccgctgggctgtgaacctaggcctttggactttaaattcattacccagcccactattttctatatctttgtggggaaaaagcaccctttctctagtctatttgtgtgtatcaaatgacgtccaaacttaatgggttaaaacaatttataattgcgtcatgatctgaagaccgagaatataagcagggctcagccaggttgtttttatattactagttttatagctgggggtcaccccttgggctgtgctgagctggaagctcacttctaatacagtattttatcctgcagaatcactcctatatggtctctaatgattcggtagtgtagcctggcctcctttacagcatggaatctaggcttcaagagaggaagaaatacaaatgctgccagttcttttatagcctacacttggaattggtgtggtgtcagttatgccacattctgtggtcaaaaaaaaaaacacaagtccagatcatattcacagggatggaaaatagacctcatctcttgaagggaaaagtgacaaagaatttgtggccatctttaaccaccacacatactaaataatgagaatgtaaacgaacaactgccaaaatatactacttagtcaattatcagatgctttgcacttcagttagcatgttcacatttagttgactatgtgaaagtttttagaaatcaggatttgtgaactattataagtctgagaaataatagttccggggtgactgatagtgggctttacttacatccttctcaatgtccaatagatgcccccaaatgcgaacattccatatattataaattctattgttttacattgtgatgttcagtaataagttgctttcaaagaggtcataataggcttctttcaaattttcagtttacatagagttttaatggatctccagaatcagaaactgaaagagttgaatgactggctaacaaaaacagaagaaagaacaaggaaaatggaggaagagcctcttggacctgatcttgaagacctaaaacgccaagtacaacaacataaggtaggtgtatcttatgttgcgtgctttctactagaaagcaaactctgtgtatagtacctatacacagtaacacagatgacatggttgatgggagagaattaaaacttaaagtcagccatattttaaaaattatttttacctaattgtttttgcaatctttgttgcaatggcttgaataagtcccctccaaaattcaggtgattgtattaggagatggaatatttaagggtgaataatccatcagggctcctcccttaagaataggatcaagtcccatataaaagaggcttcacacagtgttctcctatctcttgaccctccaccatgcaccaccatgtgaaaactctgtgaaaaggccctcaccagatgctaacatcttgatcttggatttcccaaactcgagaactgtgaaaaaataaaggtacattcttcctaaattacctcattctcagttatttttgttacagcagcacaaaatggattaagacatttgttgttgtttttttaaaaaatacagcatagctaggcttttcgtatttggaaaagaaatcaaacatatttgtggatgagaacaacgcagggtatgtgatttattaaaaatttgctttcctggaagacagacttcatagggattacttgtaatgcaaatttaaataataaggctacgattttttttaatgtaattttacattcaatttatagtaaattgaagctggccaagcttgatgataaatgagagtctgaagcattgcttttctatagaatatgacattttttaaatgttaatatttccatcttttttcttcagtttacttgtacatttccagttatgctccctcgctgccagaaagcatttttttttgtttctgttattgagacttctacaataatatttcttatccaaaattatgagggtgctttattttaataagtgccataaaatattacaattagctctgagttttattgttgaaataggctcctgctcaattcatgaggaaacacacacacacacaagatcctttgtaattgtcccaggattagggttgccacatttagcagacacaaataaaagaagcctacttaaatgtaaatttcagataaacaacaaataattttcttagtgtgtgtcccaaattgttcattgtttatctgaaattcacattttgctgagtgtcttttattttatctggcaactctacttatgatctgtggtttttggatttatggctttgaataggaatatctgctcctttacctcataccttcgaaatctgccttttgtcaaacttaattctctctttttataatattcagtcatatatagctttacagttcttccatgcaaatgaaagatacatttatttctaagttctagagttttttttaagtttaatgagcttcagttttgaatgacaaatggggccagcccttactattattgacccccaggagtcctctaagatctagcatttaagaagaactgtaactatggtaatccccgtctgctatgccatcaggaaaaaaacatcaactgtattgcaattatgtagaaattgtaactgtgattacttgtcatatagatactaattgagcacctgaagaagaagttaggtacagtgctagttctctaaccgtaccgcttttccgatgtggcacatttgcttctctcgttgacactatatctgccctctttcccttggcctacactggaagttacatgcagaaagtgtctatataaaccaggggtgtccaacccgttggcttccctgggcgacattggaagaattgtcttgggccacacataaaatatactaacactaatgatagctggtgaactaaaagaaataattgaaaaaatattttaagaaagtttacaaatttgtgttgggccacattgaaagccatcctgggtcatggattggacaaggttgatgtacagcaatggcttctctctaccggagggtatttctggtgcagaaccatttcagccagtttgaaggtggacaggaagtggaattagtgccaccagagctgcccttagccaatgaggagtaaaagttgatagagaaatcctgtagaatctttgtcccatagtgggacatttctaaggtatattctccacagtctttcagagattccccagtaagactgagctccaggtatccacagggtaacttcctgaacgtccccgtgctctcataatgccttacgagttcaccctccaaataaaccatttatttgttcacaaatcttttgttcaggatgtgtttttggaggaatctaacccaagacaaacttctcccactagaagccagaattcgagctccagttctaccactaactaaattgtcattttccaaacatcacttaatgtcccaggttctctgtatctttactttggaaataaaagagtgagtttgtttctagtgttccttccagtcacagtttaaatgtgtccaatacttttggaagttgaagtattttagaaaaggccaagattaggccacgtaacactgaacatcagaaggcaggacactgctgctggatgcctggagtgtaaagcgaaatccagggagaagagctccaaaagagcagtagaagaagaatgttagcatagctaagtacggataacctagggcagctatgaaggaagttcttagcttgggacgctgaacagactcttcattaaggtgagacaagctatccaggatcttaatattctgccaggtacctgaaatgttttgtagttttttctgaaagatataatgtgaatgaaatggaaaacgtttgacaaatattgtcataaaatttaaatatattattcattacttgaaagtatgccatttctaatgactatgaaattgccttgaagaaaaaatgtgaaacaaaagaaggcaacaggagtatatgcaagttgattatgtaacattttacctccaggcattatttatttatttaaagggcataaagaggccagaaggcattggttttctggctcagagagtaaggccaactcctacttttaactatttgagcactcttttttttgacagatttgacaatattttttgaaatatttgacagattttttttttataaaaattaagggaaagattcatattcaagtcctgaatattgataatgctcttttgtttcttggcaacaattttggcgagaagaaggtgacttaacatcaaacaatttagcaaagagttgactttatttaaacctgaaacatgtacattatattgtcttttaagactaaaaggagcatacatacagaattaaaggaacactgttttgttagtcttgccacacttcataaaacaaaagaaaataaatgttacttctttgggtaactgagttcaaactaaagccttatttatatagtcgttgaatcgctttgcagctttttttcccaagaattgtaaatcattgaaagtaaggaaatttctccttctgacaacaaaatgcatcagtaaccttagagtccccacaaaagcaactcccatctgctgcatcaccaaacttctaacctaatataatatttatttttagctttgtgtagatagacattaaatccttgtgccatcaccattttttcttaaagatgattgcagatgacaaaattaaagaaaagatacagattttattgctgggaattgatttaaattctgctcagatcagaggtcgcctgctctctctctctcaactggagggcaagattaaaatgtttgcaaatcttgcaagtacactgtgaatattacagatatgcttctgtatattctgtgacaggatcctttgctatcttcatttcaacagcattttattatgaggcaggctagaaattcagacactgtgaaatgtcaggaagataagtcacttttactgaacctggcaattaggtaaggtaaagcaattgatcctatatggtggttactattaaatctagccaaactctttactctgggtaaccaagaaaagttcaattggctgcaccatttgggagaaaccactcatccttcatagacattgctgtagggagagaatttagaggtttgctttagctttgaggcacccaagagtgagtctttctggggagtaaacaaatcgaacctctcattcccctgtgaaaaaatatatcacatataattctagctggtcttttttgtcttaaggggtagaatttattagtgatgttgacaaagaatgaaaggatttccctcgaaggagtggcatgatgctattgaggaggaaaagccttgagctttcattaatagtaaagaagtttgccattttggaggcatttttttcaaaaggaaaatatttaacagtgaaatcttttgtctcctggcacagtgagactgcgatgaagtttaaagctgagtttactagctaggttttccattcttttgagagatttagacttttgtgcatagatgcataaccttggtgacagcatcaacaaagactttacaaattacaagaatttgccgatgtgaatatatactctatattctgacttcagtgaaggttatatgtgaaatactgattaatacaaactaagtagcctcttagaaactcagtcacctatccttttcttgaaggttagttaaaggcagacatttgggttgccaagattgtgaaatatcctcatctggtgacctttaaaatgatctagatgttcatgttacagagaaggattaggtataattctgccaaaggatctgacatttcatttcattccattgcattctattccatatcactgaacaaaccctcattatagcacatgggtgctgtgaagaatgcagaaaccaatcatttacgatgtcttgtactatactgaatgctggaggatttaagcctgatcatggagggtgatcatgagtcttatataaaagactcaggcatttgcagtagtagttctatgagtaacaggaaaccattattcatgagaaattaaactagaaatagcagcaatttaggaaaacttatcttaatatttaagaagatattttttgaggataaataaaagagcagagaaacaggaggccggaaaacatgttaagaggatattgctgaaagtatatagagcctgaatgaaagcaatgacaacaaaaattgtaaacaggtacaaagcattctggatatcaaatcaaaaccaataggactagatttaggatatgaacaaaaagctcaaagtaatagattctgggactgggcaattgggacttgagattggtaattaagaaaataggcagtgaaaaagagaaatgcaatagttggaagaaggataagtgattcagttaagtttgacagtgccataggatcaagtggtgcttttagtggttagcaaactcactctcatatttagcaaggttaaaattacatgttgtttgtttctgctatgaagtttcattttatttcctgtcttttgccctcataagtgcttaatgaaagtttaatggttatgatggtaagggggataaacactataatctgaaaaaatactgtattataaccagagagccagatttcttttgtgttttcagagtgcttagtcaataattgatgctcagtaaatgtttttagaacacatgttctgattatattgactagttttattatccaaatcgtctccatcatggctaactttctgacaagggcatgaaagtttgataatttcaattaaaacgttgggcatacagcaaaaaaaaattcataaagctgtagaaaaatacatctgtaaagtggcttacctggtgatgttatctctggtgtcttcaatctctgactttccttttttccttctatctctgttgcattcccatatgcaaatatcttaatagtgctaaaccattgactatgaaattggtttgagtggtagtattattttgacataaatgattggaagtttatgtaaaaaagaacatcacacttttatagtctacgtagtagtatgtgcatgatattcagttacaatttttaaaatcgaattgagaagacatctaatatcccataagaattctattaacaagcatcatattccaagggtatatttgcacagtaatgctatagattattaaaataataataatataaaatccatgcccatattcttattttacaaatcaagtatttctagctatcagattattatttactttattagaaattactgagtattgattcagtaacattacttagaatgtcacagctttgtttgacagtatatcggtatagctacgaaaattatacctgatcaagactctgtcatcttagaggcactaacattagttattatacttcattactcttgtaatacttcctcatgagaagacactgacctctccaatggtgtttaaaggaaaaaaataagtaccctatttctaatttactgagttagtctcatgtaaaatgtctctctctctctgaaccagtactgtaacaatcaatttcagttctttcgtataggtaatacaaaattaataatgtagataaactaattataaaaaacattttaaaatgcattttagggaaaccttacaagaaagctaagacacacatgataacatgaattttaaggcaataattttccttatcaaatgtatgaccgtatcttataacaaaatgcatgtccgtaaatccaatcccgtgttaaaatataaggttgaatatgatactttttctgaagaatatggagaactatcctgtttaatatttctgttatgaacagaatttctagtggatttctaatactagtagatttctactggtacatctggtagtactctcttattcattggaagtaatgatactgtatcctttaacaattaaatttttatctaagtcatatctagtaagactaaaaaagcactaaactatttttacataatggtctacagttttggcacactgaggatatttaataatggaaatataatgtgattaccaagttattagaaataaatagtgatgctcaaaagggctatttccatgaatctcagtgtaagaatgcaaggataatgtgaatacgtcagaaatgaaagaaaataagcatttcctcaccacctaccaaatctaagcactgtacaagctgaagttaatgtattgtctcatttaactctagtaataagcatgtcttagaagaagttttaaaatagattgagggggtgcatgtgcaggtttgttacatggatatatcgtgtagtggtggagtctgggattttagtatatccataatctgaatagcgaacactatactcaataggtaatttttcacccctcacccccctaccagcctataatcttttgtagtttccagtttatattattccactctagatgtccgtgtgtaccctttgtttagtttcttcttataagcgagaacatgttgcatttaggtttctgtttccaagttacttcacttaggataatggcctatagttcctattcatgtaactgcaaaagacaggatttcatactttcttaggctgtgtagtgttctgtggtgtgtgtgtatatatgtgtgtatatatatgtatgtgtgtgtgtatatatatatatatatatatgcgtatatacacacatatatacatgtgcatatcacattttctttatccaatcatttactgatggacgcttaggttgattctttgctattgtaaatagtgctatgataaacatacaactgcaggtagctttttcatgtaacactttttgttgtttttgttgagtatatacccagtactaggattgcaggatccaatagttgtgttttaagttctttgagaaatctccatactgttttacataatgtttatattaacttacattcccaccaagagtgaataaacattttcttttctccacatccttgccaacacctgttgttgtttgacttttttaatgacaggtatccccttaaaaaaatgagatactgtcatttggaacaatgtggatggaactagagatcgttatgttaagtgaaataagccaggcacagaaagacaaacatctcttatgttctgacttatttgtgggatctaaaaattaaaacaattgaagtcatggaaatagagagtagaaggatggttatcagagactgggaagggtggtggaagggaggtggggatggttattgggtacaaaaattacagttagaaagaatgaaaagacataatatttgatcatatcatacagtaactatggtcaataataacttgtacattttacaataactgtgaaagcatataattaggttgcttgtaagacaaaggacaaatgcttaaggtgatagatactaaattctccatgatgtgattatttcactttgcatgcctgtatcaaaacatctcatgtaccccacaaatacacctactctgtacccacaaatttttaaatgacattgaaaaaaacaaataatagccatactgattggtgtgagatcatatctccttgtggttttaatttgcatttctctgatgattagtgatgttgagcattttctcatatgtttgttggccacttgtatatcttcttttaaaaaatgtctgctaatgtcctttgcctactttttaatggggttatctatttttcttcttgttgagttacttttagattctagatattagttttttgttagatgtatagttcggaattgttttccattctataagttgtctgttcattctgttgattgttttttgtttttttgtttgtttgtttttgctgttcagaagattttaaaattaagttccatttgtctacttttgtttttgagtacttagtcataaattctttgcccaagccagtgtcgagaagagtttttcctaggttttcttttaggatttttatattttcaggtcttacatttaagtctttaatacattttgagttaatttttgtatatggtgatttatgacccagtttcattcttctgcttatgactatccaatatttacagcacaatttactgaataggatgtcctttccccagtgtatatatacatttttttactttgttaaagatgtgttggtcatagatatgtggttttatatctgggttcttaatttggttaaatcaatctatatgtatctgtttttataccagtaccatactgttttggttactgtagccttttagtataatttgaagtcaggtaatgtgatgccttcaactttattcttcttgcttagcattgctttgactatttgggctcttttttgattctctatgtattttactatctttttctaattctgtgaaaaatgatgttggtaatttataaggactgtgttcaatctgtaaattgctttgagcagtgtggttattttaacaatattgatgctcccaatccatgagcagggaaagtttttccatttgtttgtgtcatctatgatttatttcatgggtgttttgtagttctccttgtagacacctttcacttttttgtttaaaggcattcctaggtattttttttttttgtagttgttgtaaatgagattgagttcttgatttggttctcagcttgatcattattggtgtatagaaatgctaccaattttgtacattgatttcatatcctgaaactttactgaagtcatttatcaaatatagggtccttttggaggagtcttaagggttttctagatgtaaaatcctatcatcagtgaagagaaatcatttgactttctttttcccaatttggatgccttttatttctttctcttgcctgattgctctagctaggacttccagtactatgttgaattggagcagtgaaaatgggtatccttgtcttgttgtagttcttgggggaggggggtgctctcaacatgttcctgtttagtatgatgttggctcttggtttgtcatatatgacttttgttattttgagatatgttctttcaatgcctagttgttgagggtctttatcttggggagaggctggattttatcaaatgccttttctgcatctattgagatgatcatatgttttttgtttttaattctttttatgtggtgaatcacatatattgctctgcatatattgcaccacacaaaacatatattgtgttatgtggtgaatcacagatattgctctgcatatatccctgcctacctggcataaagctcacgttattgtcatgtattatctttttgttatgcttttgggtttggtttgctagcattctgttgaggatttttgcatctatgttcatcagggatattggcctgtggtttcctttttgttgtgtccttacctgcctttggtatcatggtgatactggcttcgtagaattaattagggagaatttcctcttgtttgatattttgcaacagttacaataggattggtaccagttctttgcatgtctggtagaattcggctgtgaatacgtctggtcctgagctttattttattgggagatatttattactgattcagtttcactatttgttattggtctgtccaagatttttgcttcttgtggttcaattttgggagttgatatgtatccaggaatttattcatttcctccagattttctaatttgtgtacctagagatgcccatagtagtctgataatctttcgtatttctatggtatcagttgtaacgtcacatctatcatctctgactttgcttatttgattcttctgtttttttcttggttaatctagctagtggcctattaattttgtttatcttttcaaagaaaactctctaatttttttaattttttgtcttttattatctcagtttcatttagttctgctctgatcattgttatttcttatattctgctagctttggtttcggtttgttcttggttttctagttcattgaagtacaatattagtttgctaattttagatctttctatctttttggtgtaggcagttaatgctataaatttccatcttaggactgcttttgctgtatcccagaggtggaggtatgttgtatgtctctttttatttgtttcaaaaagttttaatttcttccttgatttcattgtccaaagatcattcaggagcaggttgtttaatttccatgtatttgtatagatttaaggagtcttcttggtactcatttctagtttttttccactgtggtgcaagaagatgcttgatatgattttgatttttttaaaaatgtgttaagaaccaccttgtggcctagcacattttcaatttttgataatgatccacgtgcagatgagaataatgtacattctgtggtggtagaatagaatgttctgtaagtgtctggcctggaaggatattaatacttgattttacagacaaatagatgtgttcaaagagtttaaggagttgttcaaggtaacttcagtattaattggtagattctgattttaactttgacctgtctgcctttgagaccatttctctccattttgagattccagtgaagcttgactccacctgagatcctagagactagagcagttgcagagaagtgacaaagagatttgaagatgttgtggcatttggattcccaggattgggaatgtctagatagaaggtacagagactgtgtgcatatgagtcttcaaacatagagtaagcagtagtggtagctacacattaaatactcagaatcaaaatgcttaatgaaataattcatcaccattactcctgtagttctttaaaatagaggaaaaagagactataagggaaacaggaatataggcttatgataagaatggcaataccgtctgagcaggaggataatcattggaactgaatttcacaactatattctgttagcagcacaatgcatagcatttcctctgtgctctgcctgaaactttccaccccaactctctcccaataatcttcttttctttttcaataattattttcagtaaaggcattttataattatttattcaatgttattggtttttaatctgattttaattctgtaactatatgcagaatgtatgggtgggtgcatgcatggattgtagaaagagtaggaaaggcaagagaattgagggctaccatttcgtgattagggactgtcctcactccatgacatatgtctgcccatgcaaatttttctgtgataaccatcagatgaggtagtttgaacctacttttattaatgtagtgtaaataaattggaagttcaggtattatttaaggatttaacacttactgtatatttctccagaccttaaaactttgctgtaacttcacttgttttcatgacttttcaaaaatcacattctcttcctgcacttatgatgtctattagaaaggatgatagtcagaatgtattagatgagggtaaaatagattagtattaggttaggtcattgcagtttagtttcaaaactttgatataaatatggctaaatatgaattctttcaactaattagatgctaatatttttggaatttatattgttttccaggcaaaatgcaaaacagttttaccttattcaatcttcttaaccacataaagaaataggcagttttattatcttagttttacaaattaggaagctgaggcttggtgtggttgatgactttctcaaagtcacgtgattggttattgatgcttccaggaattacacatagaaaatctgatttcagatgctacacttttgactacagttttactgtctcctcatagtcatgcacaagttttggtcaatctatttcatcctatgtccttttccatatgtaggagtacattaattgtctactttatttttaaaacagtttcttttcgtatttattgagtccccttcaggctattgagaagcatttagtgtgcttgtatagcctttcaaatctctccattgaaacagtctttcagaacccccatttggtagcttaggagttggcagaaacataaacattcatttctaacaaaaagataaaatcagtgtgttctgatataagaactaataaagatattcaatcacatttaagtaagtgaatatcaaaagcttttctagggtagcctgttgaggaagattatttaaaatattcagcaaatttataacaaagttatataccgtaaatagatcttcatggaaagctagacaatactgtgaccagccaggcttagcaaagtgaatatttcactgcaaataaaatcgaaagtcctttccagatcatatcattcaggccagcaagggatatagagcctagcccagtgtagaggtggtagaaggaatggggcatagaggaaaagagtgaaaaaaataaattacctaccaccccatcatttcccaagaaatcctaacactttctgatctgtacttgaagtttttatttgaaaaaaagtcaattcctgtccagatgtcttgaattaacatgatcattagtatctagggatttttttgttcatgagacagcttttttaagatacttctttcctggatgttagactcaactctattcctagaaccttctgaattcttaatgtcctttgcaaattttatgtttgctacaatttttttctcgttagtctttccttatgtgtgcatttattgagataaactacaaactactgaatatttgtaattaaacatctaaatatattaattttaaagtcatttttggagacaatagattgccttccaattcatgatgaacagcgttctgtgttgtttctaggggtgtgttttgtgtgtgtgtgtgtgtgtgtgtgtgcgtgtgcgtgtttgtgtgtgtgtgacctgcaagtaccggcaattagctgttgggtattcaatgaagtcggaggagtagttaaaaaaaaaaaaaactttacatataggtaacagctgttcttttcctgttctttccatagctgagtctatgctatggccaaaagaaatagacaagtaaaacaaaagcttctcccatcgaatttacaggatacccatccttgtttttgttttctattatactgcctttcgattaattattgctcttcacctttaaacatcaaatcaaaaatttccctagccttacataattccatgtctttatttcctaagtattattttacatgtgttctaagaaagggtaaaatagcatagatctagaataaacactgaagtggctctccagtggtttttctaagccacttttgaaaaccaacttgacatggacaagagccagaagaattcagtatcactgatggcatttaaaagaagtacaagaaaagtcaggtttaaataataaaattgggaacatgtactaagggagtaacaaattttgttaagccctttaactagagacttatttagaagaaatacaattattcacagaggtataacaaaaactgtttgtccaatctaggcattcttaatgttacatctcactgttggccttttctcttgtcataaagaaaaaaatacattatttgacatttgacaacaaacattggtaacatttgtatctaataatggtaatgaaatttaactaggaacatgatagatgtttgaaatctggtaagtgttacaaaagcattcctttaataaaataatgaaaataaatgcataataaagtacctagtatgtgtgtatatatgtgtatgtgtatgtacaatctggaagcttttaataaaggaaaacattttaacaatattatattacaatattttaatttgaaggtattattttctgacagacaaacatttttgtgtacttctctagggatgcatctatatttggaaactatttggctcatatttcaggcttaattagcaaatccaatataaatctccgttgtataaattcatctatgacaaattgaaatccataagaagtcagtatttaaaattgtaattaaatatagccttacaacactttagcatattattttttttaaatactcttgagaattcatttctttccaactggagaaacaggcaggcattctttaccccaatgatcaaggcctttattcatggattcctagtttggcagaacaattgaactttttaactccagctttttatgtctggcgtttctgctacttgtaagaatcagtgtaaaagtaaaccctgaacgttgcatagttcataatctgtattttgctgatattaaggagattagctaatacagttatattcactaatatttatttcgcatttgaagtctgagaaaataggagacgtgcttactgttttaccatagcttttgtcttacagctatttagtgtgctcaaaaaagtcagtttaaccttttttagtttaattcctaattagctgagaaagaagaaatacaattttaaaaagtcatagaggagaagagatactggaaataacattaaatcaaatgtaccttatgcaaatctactccagcactctggactcttcaacgttcttagtcactgtagagagcctttccccactcctttatttccttgtactcaccgtaagtccagagggttcttgtgttagattttaatgctatcatctcacaactctctttagtggtactttacgttagcacttctgccaagcataaaatataaacccttgatcaatatggcaagaatgccatttccaattataaaacaaatagatgaacgaaacaaaatcagaacaactaagtaatggagaatatagtacgtttgatcacatagactttaaaagactcaataagagttggattcattccatggatccaatgtttttcttacacttcttaagtaaaatatattaaaattgtgaaaaagcaatttacatgtaaaaatgaaaactggcattatttacttgtaattttgtaatatatgtaattatatatactcattgaaggacagaaaagaattgactaaattcagaaaaccaacttatgatacactggccaccaaattatcattttaattattatttgaaacattcccggctgacaccttcaaaatgttcccagtcctgtcttatataactcagaaaacacagactcaacatgactgtcaaggacaactctgaattttaatgtttccatttttggcctcatggcaaaaagagttttattaaccattataagctctggaatgtcaaaggcatgataggcagtatagattgcacacacaaaatagatgcatagtcattttattctaaattgcttcacttgaaaatgtagtatgaaaatctagagagacgaagtaaaaagaagtgattttatagtgttctaaaatgttgaggcttcgaaaataagaagcctaggataaaaatgctcatgcatttgagattgtgattcagccatcctaataagttcccttccacctgccatagagtttgaatacctaagagctagactgataggtgctaagcactgttgttttgcaagtagggacagcacgtttgccagaaagtaacgggaaatgtcccaaacttgtttctccactcttgtgttatgtaacaaaatgttctaagaaacaaagtagttgcctagaagtctcaaatagctattcagagaaatcccaataataaatagtgtaacagggtaaggtcttatgggatctggagcacccaggcaacataccttggttctagagcagcctcctttgtttacccctaatttattcctgtgtttacccctgttcatcattacaaaataattgtacatcatgtttttaaaaagattggaaatactgttttgtgacagcctcacttaatagggggaaatgattttttcagagccacatttgtaagttagaaaggcagtatttgaattattctggttttatcctagggttcagttgagaccaagtggttattttctgttgaggttagtgtaattgtgattacaccaaaaatcactaattcttcctattatattgtaatctttgtgcaatcaggaaggaacaaactcatctgtgcatgttttccccaaacccccacatggtaccatttatctgacaaatgtttattgatctttatttgcttgtaatacatagtgagaaggacagagggcatctctgttctagtggactgcctattatagtaagtagagacaaaaggactaagctgatacataagaaattattgagtagtgacaatactatgattaaaaaaatgacagaaatggtgaattactagggagcaacattggatagtttgctcatgaaaagctgctctaggtaggtgacacttacattgagtcctgaatgataaagaaatgatttaaacatctggaagaaaagcaatcctggtagagggaacagcttgacacatttttggaagagagacaaagcaagtcattctgaaacactgtgagggcgagaatggtatacaattagactggtgaggtagtcaggtgctagatcatataagaatttcaggtagagaagttaaattttctttcttagtatgatagaaatctattggtttttataaatcggactgacatctgatttgtagtttgagcggaagggaaaaaacgagtaaaggagctaaaaagtagtgtataggccaggcacagtggctcacgtttgtaatctcagcactttgggaggctgaggtgggtagattacctgaggtcaggagtttgagagcagcctggccaacgtggtgaaatcccgtctcaactgaaaatacaaaaaattagctgggcgtggtggtgtgcacctgtaatctcagctactcgggaggctgaggcaggagaatcccttgaacccggtaggtggagtttgcagtgagccgagatcatgccattggcattccaccctgggtgacacagtgagaatccgtctccaaaatagaaaaaaaaaataaaaaaagtagcacataggtaggagggtaatcaagagaaggtgtcaagaatgagggagtggccaattaggttagtaatcaacatgtcaagtaagacgctataacaaatggttattgaatttaggaacatgaaagttgatggtgtcctttacaaaagatatttcaatgggttagtgggcaaagtgaatagtaggataaatatgtaggcacagtaactataggatacatttgtttttttttttttcagtgaagaggaacacataataggacagtaggaggaccggtttgttggatcaagagtttgttttatttttatggtaatggagaagttcagtagagaagaagagcctgaaaatgccagaagtgctgatagttgtaggaaaaaagtccttgaaagggagaaagggggtgggatgagaaggagaacatcctgctgtacctttcttaacatttgtcttctctagatactttccagttaaattaacaatagaacatataaattttgctgagcgtcatagcagaaaattggcttggaatggttttaggttaataaaaaatgggagtacctgagatgtagcagaaataaatttcaccatttgagagcaaatcatttcaacacacatgtaagaatatcattttaatttcctttaaaacattttatctttcaggtgcttcaagaagatctagaacaagaacaagtcagggtcaattctctcactcacatggtggtggtagttgatgaatctagtggagatcacgcaactgctgctttggaagaacaacttaaggtcagattattttgcttagtaaactaaatatgtcctttaaaagaactataacttgaaaagtattttaaaaatttagaatgcaatttatatattaaaatacttagaatacaatatgtgtacaatatacacacactcataatcagctgaagtgctgtgatttaaagaattccataattctgatacaatagtaactaactgcggatgggtaaaatctaatactttaccagaaaatttcaattaatattaaataaggctgggaagcaggggttgaagggaggttactggttaaaaaaaatttaaatgcagacatttttctaaggcatggagtatttccatttaaaataacaattgaaagcacccatttcatcattagctgacccagtgtgaatagcttttcaatataattcatccaaggtgatgcttgtgtggttaaggcatcttgaaaaacagtccgtagaactcacagatggttgtatggtgggcctatactcttctgtatttgttttctacttgctttcattttcaccttattttctgcctttatttctttggcccaaagacatctactaaatatcggtaaatgtactgattatccctaatttgcttaaactctatctgcatttgtccatgattgcatacccctttaatggctactgccttccagcctcctcttttgtcttcaatcttctttcctcttttgatgttctcattttgcctctatatagctctgtagtgtcatgtgactttaagataatctagactagtatctaaaagggcagcattaaaaggaatcaagtggagagaaagcccttgctataacttttctttgattccatcccatcagttccttcagtcccaaaagaatccatgcttgagttctatactttatttaactattggctggaattgtcgtggaatgctctgcttccatttgactttgaaacagagatgattcttaggttctttgcaagtgatataatcttgtcttacctagtttactttttaaaagcaagaagaagaggacgagaagatggtacagaaggaggagtaaggagaaatcataaagtattaaaagattgataaagtataaaaacataaaaaaatttaacacaaataccctgggtatattataattctagggtagcttcagagactgtggactttaatatgtttaatactggactgagagggattctggtagacgtaattagaagaattacaggaaagagaaacaggtatttggatcccctaaaagaaaaacaatcatcaggactcagagaaggatcttagcaggctttttattagagcagagtctggctatccttaacttattcctcaaaacctattagtgttgagtgcccatctcacgccttctcttccttcgccctggcatccctcatcaccacaattccttcatccattgcactaaaattctgttgaaatgccatccagaggctcaaaaaggatagccagctgtctttggtaaagaggtacagatgggggaaagtaggaagggaagtccccatttagtccaataaggaagagagatgcatacttaacaccctgagttagaactctaaaaatacttccaataggatatatctgcatgtattgatttattctgtaaattctattatgatgatattttaggatttctctaactttaaaatacctttagagtcttctttggaaaaggtttgaagaaaaccaaagacaggtcagaatatatgcttagagtttctgaaagatgacatagcttatgaagtgtaatattctgaaaagtgtgctctccgataattagattctttctctcaaaggttcagcttgtccctcagcaatgttactgcagattagagtcttgtccttaactttagaggcttccaggatgtcagtgcgtagagagtctgtttcataggcagtgatgccagttaacttatttgattgagaaatatttttataaactaaattttataactaaaattggtcatttatatagtcttcagttttagaggtcattaccacatctctttctaagcattccacatcccatttgaatttttttcaacaagtactcgttatgttcttactatgtcccagggattgtgttgggtaaccaggtaagacagttaaaaaaaagaatttgtcactatctaccctggttgcgatgggtaatttgagagcctactgccttccttggaaccctggaacaatggtgactatatctcagtctccctctttgtagtagaatgctaattccttgtcatccatggtcactatgataggcaggtaggcatgggaactgcgctcttggtacatgcaatccagtataaaaatagacattaataaagtatttttaaaaatgagcaaatgttaaagaatggatgcaacttatttataaaggcaaaaaataagcttttgtgacaggaaattactctgacttagactgaactttgaacgcaacagatgattcctgaggaaagttttctttaagctaagatctaaatcatacattggaggaaaatggataaagtgtgcatgtaagtgtcatgggatccttgggtgtcactttgccagccagaaacctctgtggccggcagcacctctgtctgggttttgcttgtgcccgctgggctccttgcacccactcagcctggcaggctgtgcttggcttgcactactggcccggatccccatgcctgccaagggcaagccaggcacagagcagtaagaggtatgtgagcaagcgagcatgaggcctggccactgtgcacagacaggcatgccagctgcagcggaaggcagctacaggcaccagtactggtggcagctccatgtgaggctgtggctggaccagatgtaccacaagtagcttctgctgcaggcaccaatgtctggacaggggatcgcggtggcacctgaaagctcagagacaccaggaaccacagagccccaaggagcatgttacagcatgccacaaccctggcttgaggagccccaaggtctgggctctgcaaaaggccacagctcttctctgtttctcattgcccatagcatggtgagtggggggcatgtttcagccctgtttgtgttacagctctttttgtcctgccattcagcaagtcctgagttcttgtcccatgtccaggaagaatgaggtacatggacaactggagggtgagcaaggtgcagaggagcttcattgagcgagagaacagctctcaggataccacggtgggtagctcctttccacaggcaggtcgtcccagggagtgtgcagctgtgagtagagaggagacccatggtgggtggctcctttatgcaggcaggtcatcctgaagagtcaaggagacacaaagtaggtagctccttcctgcggctggtagtcccaatgtctaagtttgtctgagtctggggtttttatgggctcggaagggaggaggtacattctaattggtccatggacatccatggataggcccagaaaaagcaccataagttctcattctgggccacaaactccacccagaactggcagcccagcccccaggcttcaggccattcttggcttgaaggaggggtttctctgtggatctgctcctttctgcccaggagccagtctgcctcctgccaccatcaacatgccatccatgtagcctaggcagtttataccaaggggtacctgcaggcccacaccgaaccatcctcagtccccactcagcctctctcccatgctcatcagtgcccaaagtccagacgggcgcaaggcagcagggggctggcatgccagcactgtcccgagcacacacataaccagtcaggttgcgacaacacctggtcttggccgcaactttgcttctcccaggagccagtgcggggagcgaggagatgccagggagtgggagcaggcacttcttagtatgtggaggcaggggggcttcccaggcccccaagagcgcaggaatgcccaggtccggagctgtggctgggtggctgcagctgcacctggaagcatggggctcccaccctgccaactcagtagggagcagcgctcctgcttgttcctggcccttggtggctccacacagtgcacagccctggccacgcctcccttgctgcagctggcatctttgcagtggccgctccagacaggctgctgctgccatcataagtgagattggtggaggtgggtagagtttctaggatggataaatggtaaatcaagagagcgtggtttataaaaacttgcatgaaaaaagactataaaaagaccataaagaaagccttttgttcttgggagataactgtttctaataaagaaagaaggagaaacatggttaagcccatagcttatagaagatgctctaatgaaaatgtcttccaaagaaaaagcaaaaccattaaaaccctatttttaggtatgttattctgtacaagttaaaagttgagagccaactatagatgtattgaaggtctgtgtggtcatagaaccaggagaatttctgccatataaaaggcatttgaattattttgttaaaatactttaatattgaagttactgcctaatattttggagaattaaaagtatatgaaaagaatgaggctaggtacagtggctcacacctgtaatcccagcactttggaaggctggggagagaatattgcttgagcccagaagttcaaagattagcctgggcaacatagcaagactatcatatcgtattttgattttcctaataaaaataattataaagaatggataaagacagagtgtattaaggttctctagaaggacagaacccactggatggatggatggatggatagatagatgtatatatgtgtatataaaatatacatttaggagtttatcatggagaattggctcacatgattacaaggtgaagtcccatgatacgccatctgcaagctgggagaagagagaacctagtagcctggtgcagtccaagtccaaaagcctcaagaccagagaagctgacagtgcagctctcagtgtgaggccaaaggccttagagcccctgggaaatcactggtgtaagtcccccagtccaaagactggagaacctggagtcctggagtctgatgtccgagggcaggaggagaggaagccaactgccccgcagggcacaggaagagagtgagtaaacttaccaagcaagctactttatccctgttctcctggctttgttctagtctaactggcagctgattgggtggtgcccacccacattgagggtgggccttcctctcccagtccactggtccacatgtcagccttctttggctacactctcacagacacacccggaagaaacaatacttcatcagtgatctaggcatccctcaattccatgaagttgacacataatattaaccgtcacaacaagtattctattttcaagaaggaaaacctggaaaacacaattttggatcagattattaaacatgaggccatgctcactggtatggtttctcacttatctcatgcagttaataaacatatttattgcctgaaggaataatttttgcagatgagatagttttctaagaactaagctacattcgctaaaattgagtcatgtaaaccaactttatatcagatgacattaaacaatttgtagaaatactttgtggtagtattaagacaaattattttgttagacttattaaattggctgatccaatggaatggaatgaatttgaggtattctgattttcctgaaccttttagcaaagcctctgcgtgatactgtttattggtaaggtgagtctatctttctctatgagtgttcgtgggtgagtctgtgttttaatatattcctttctagtatctgatttacgtgctgaaaattctggggaaggaagccatttgaggatttagctggggctctgtgtaaagtgtgcccctgtaggagtggttaatggaatatttctgctcccatattaacttagaaggtttatagctatgtcctgaggagttagaatatcatatacaaatgttacatcctattgttttaagtcagaaaactcatgtttatagttcgaaatgttgctgctttttaaaaatgcaagtagtataaatcagttgaattagtttgagatacaaagggtctgacttcccatctatagatataaatgtaaatatatataaatgtaagtgtgtaaaaatacatgtaattttgtctatataaaaatatatgtataaatgtgtatatagttaaatttatatacatctctttatgtttctatatatatacatacgtacatctttgtgcatatgtatatatatgtatatacatacatatacataaacataagcacatatgagatagagtgcacatgcttactttgaaacaagcttgatattaaggatgatacagattcttagttaatgcaatcacagactgtgatatagtgtctagattacatgaactaataattatactctatgctgatttgaatacactgtattttacgcccacgattggtactctatcttagcaggattttctcagatggcagcatcctgtgaagaatatttgtagagtgggcgattatttaattaaaaaataactaatcatagggaaatggcacatgaacactattgtgatggtgaaaaaggaaggcactttctctatggtttttcaaaatgtcataatatcagaagcagacagaagttggtaactctggatgtcttctgcccagatctttcctgagtccattttcttctaattatcttctgaacacatccttgaagtccaaacaacacttcaaactcaacaagatgaaacttacctcactgtacattgccttcctttaaacctgctttccttactgaatttcttatttttgtcattgcactggcacttatcatgacacctgtaccagaaacctagagtcatccccaaattcatccctgtcctttcccttatgagccctttgcatgcaatgtcaaaatatttctcaaccttatcttgtatttattatttcatctttgttcttgtcaacatttctcaaggtataggccatatcataagcccccaaagtccttgccttcagtcttaccgctcttccatccaatctccacattgaagtcagtgtgggttcccaagagcctgtttaatcgttctcctttgcttaaaatcctgagtcactttccagattctgatactttggcctacaaggtatttgattacctgactcctaccagtctctatagacttgtctcatgttatctgctttatgtccctcaacctgcatttgattcatacaagctgtttctgataccctgtatgttacgacctctttgcacataccaccgggtttaaacagacgactctgcttcataagatctgctttgataatttcatctatgtatagaaaactcatttcaagttttcctccatgaaattggccactctacctagtgatgactactccctctttgtgccatgtctgtaccctaattgtgtctgtttgggcaccgatcatatacttttgcagttaatattaatgtgctttactcttttattagaatctaaattacatgagatgtgtcttacacattcttgcctgcattgtcagatacaagtaatcagtaattcttgtaagataactgaatgaacctatgaacagacggttggatataattccaagaaagatttttttgacttaaaagggagagctttttgttgtaaggtaattaagaggagaaactctagaaatagacccttcctgctctgttccttatctacagtatacctttgggcaagtcacttaaccatccttggctttagtttccccatctttaatatgaagattgtattagaacctacattatcagatatctgtaaagggtaaaagggtagttgagaagctaaagcatttaaaaatcactgaaatatagtaagcaataataatattagttactattattatcatcatcagcccagagcattcttacaatgcgataagagctgtggaaagtggtgagctgttcttcattaataatatttaacacaaactggaatctcatgttcaagtatgttttaaaagaggtgacatactgagtgggaagttagacttgatagcctccaatgtcccttccaatacaggtggagtgcaagaaaataaaaggaaatactgcccaatcttatctagtagaagcataattctccctcattctgtagagaacttcagctttaaaaagcatgattctcaaaattactttcataagaaaaaacaatctgaatataatggcaaaatataaagaagtcaaatactacattctgccaattattttgaccaacagtgataatttttaaaggtgacaaatctggataagtagacaataagaatgacagacatttaatggtaacatctctttggacattgctgttagtgtcgttaatagttttaacttgtgtaacatgagtatcacacaggttacaaagggaatgtgctatatctcagttacaaagagaatgttaaaataacaaagccacttggaaagaaaatgctatactgtgaaaggtagttgttcagaaagacgataaagtcagatttttctctcatcacctaaatgtcagttaggtaactgaaatttttatagtacatatcttcgggatagtatgagaaagaaaattttatagaatgttagaccctatcaaattaagaaatagaagttatttatgaagaggaatatggttgaaacattttgatgtttcgctctagttcctaattttatatttggtgaattaaatgcatttaaaaaaaactttaaatgtgatggaaataatccacaaagctaagcatcaacatttgttgcccaagaagcaataattataattattagattattatttttcaggagttttacatgctttgtatgtaatgccaaccctatatcacaaatgagaaagccaatgcataatgaagttaaatccaagttcatatagcttgcaggtggcaaggctgacactggtattcagatgtgtgacaactcaacctgagatttctcccaatctctcaaattcatagtagaaatttgctatgtggccttgtgaaaattatgtgatttttttcagttttggtttactaatcagcaacgggggaatacagaaacctatgtaacacagtaatgtattcgtacctgtaaatttaactcattcatgcaaatactatctatctgtataaaatgcaatatctattcatatatatatgaatagatatagcatttgcatgaatgagttaaatttacaagtacaaatatatataatataaacatatatatttatttattttagcacctgtcccactcaattgcattagtacataaatatttttctcttctagaacaacactgttctagaagagaatggtttatatatgtatatagtttatataagcagtatatatatattaacacctgtcacactcgattgcattagtatataaaatttttttcttttctagaacgacactgttcagtaaggaagttgctatacacctttggctattttgagcacttgaattgtgactggtatgcttgaggaactggattttttattttatttacttaaatataaaatggcacatgattcagttattagaaaacttttgagtatgttttgatcagctttgatatgtgcattgttttttcaactgcacattgtatcaagtataaataaatgttgaatattctaatgaaatttgaacatccaaagccaatgtgctgtaagtatacagttaacgctagatttcaatttatgttaatacacggtctgttgtaatacatttggccaatagggtgttaggtagatttgaaagaacacaatgtctggattactcaatctgttttctattctgactttataatttatgagttgaacaataaattctctcatgataaaaattatcaaatgaaactcaaagataacagtgatcataatacccaccatacaaaattacaggggaaatataagcaagtatgctggaacaataatattctttttttttttttttttttttttttttttttgagacggagtcctgctctgtcacccaggctggagtgcagtggcgcgatctcggctcactgtaagctctgcctcccgggttcatgccattctcctacctcagactcccgagtagctgggactgcaggcgcctgccaccacgcctggctaattttttgtattttctgtagagatgggtttcactgtgttagccaggttggtcttgatctcctgacctcgtgatccgccagcctcggcctcccaaagtgctgggattacaggcgtgagccaccacgcccggccacccggccaataatattctttatgaatgcaagtgttaatacatttacaaaaaatttttaagtttattgatacataatatttgtacatacttatagagtacatgtgatattttgttacactgttgtatataattatatagtcttcctactctgctatcgaacattagaacttattccttctatctaagcgtatgtacccattaaacaacctctcttcattccatccacacactcttcccagtctccagtatctatcattctaatctctagctctatgagatccaattttttagctcccacatgtgaatgagaacatgtggtatttgtctttctgtgcctgcttatttaacataatgacctccagttccatttatgttgttgcaaatagctatatttcattcctttttatggccaaataacattgcattatgtatatataacctgttatctgtttatctgttgatggttctgaaaaaaaaatgcaaactttatggtactttttaaattgaagtatcaagcaaaggacataagttataattatagcttaaagacttattacagaagtaacatactatgattccacatccagaaaaagatagtatgttaccagcaaccaggaaacctccatcaagccctatggtatcataaactcttcccatctcctcaaaggtaacatgtatcttgagttataatgctgcaggttagtcttgctatatttttaacttgatgtaaatgaaacttttatatatgcagttttttaactggcttttttcactggatactatatttgtgagattcactatgttgcatatagcattactttattaattttcatcgctggatagaattactttgtatgaatataccacattttacatattctgttcagaaaattggggttgtttccagttcggaagcattacaaataattcatctatcaacataaattgtacgtatatttttgtgtatatatgtaaacttttgtattaggtatttacctaagaatagcatttcttaatcattgggtatatgcatatttagctttcaagatattaacaaagggttttccaaagttgtataaattcatattctcaccagtagtaaatgaaagtacaaactgcttcatatcttcttgaatacttgtttgttaaactttttaatttgagcctttctggtgactttataatgtcatctctcatttttcatttgtatatactgatgaccagtgaggcggaatactatttcagttgttattggccatttaaatgaactcttctctgaaatgcctgtttttctactggattttctatatttctcttactgatttattttagtttaaaatatatatattctgggtattctttgctgtttatattacatttttctttttgaatgggtaccttgccttttcactccgtaatgatatatctcttcataaacagaagtttaaatttaacatagttcacttcaatattttctgttatgtttagtgtacttttgtcctcagtttaaaaataaaactctctactttaaaattctgaagctatggtcctgggttgctatataggaactgtttgttttacctttcgtattacaatccacctattattacaggtatgaggaagggatgaatgtccattttttcccatatagatccaactgaaacaacaagttggcactgtagaatattgaggaaaagatggtcttattgcaaagattttcaataagaccatcctttcctcaatattctgtggtgtcatctttgacgaaaatattagaaataaaatgcctatacgtgcatggatcagtttatggactctaatcagttttatttctctacttgcctgtcctcatgctaattccacattgttttaattactatagcattatgacaagttttaatatatggtaatatttttttgagatggagtttcgctgtttctacccaggctggagtgcagtggcaagatctcagctcaatgcaacatccgcctccctggttcaagcaattctcctgcctcaacctcctgaatagctgggtttgcaggtgcccaccatcatgcctggctaattttttttgtattttgagtagagacagggtttcaccatgttggtcaggttggtcttgaactcctgacctcaggtgatctgccagcctcggcctgccgaagtgttgggattgcaggcgtgagctaccaggcccagcctgtatctggtaatattgtaaaagaaaaaatgcaccagacaaacaggcaagaaagactttattcaagactactgaattatggatcaagactattgccataggagagagagatggaaatcatttctactgaaagaaagacaggagagaatttaagcactgaggagagctagtagaaaaatactggaagatattagggggttaggatggtgattaggcaatctgtgattgttaattggcacttaatgaagttaggctcctactgtcccacagagactgggagataggcgtgctatcattaacaattacatttcaaagagatggctcctaggtccttgagaaagatattcccggattgtagaagatttacatctcaaagaggcagagaatatgtttttggttgcaagtttccctaaagtaagcgctctaagaaaagagaggtcaggagcctatagtcaaataaaagcctgtctagagtttagtcacattaagtttgttttggtcagttggtcagtaaaagccattttattttcttcctttttaaagattatcttgactgcttttggccatttcgatctccatatgaattttaagaacagcttgtgaaccctgcccccaaaaagaatctgctgtggttttaattggatttcatctattctctggatcaacttgtacagaatcaacatttttattatgtaaagtctttcaatcctttcatttagttaggtctttattttctctcaataatgttttatagtttttaaagtaaaggctcttaaactttctctgagatttatttcttgggtttttatatttttgctgttatgaatatatttttgaaatttcattttctatttgtgctgatataaagaaatacagttgattttttttcttggtcttgtatccaggtaccatgctacatttacttaataatttgaatacattatctgtagtattattcagatgtacatatataggttgtttttgagtaatgacagttttctttctccctttccaattatttttcatgtcattaattttccctgacatattgtactgtataaatactctagtacaatgggagtattgtggatatttatttctcattttaagtctcagagggaagaactttaataaataatcattaagtatgatctttcctgtaggtttgttgtagataccttctgttcttaatattctaagaggttttatcactaccggatgccaaattttatcatatatttttccagaatcatttgagatggtcgtatttttcttctttattctgctatatgtcaaatcacatgacttagttttctaatgctaaaaaagcctttcttcctgtaataaactaaacctggataagacgtataatcttttttgtgtattgctagattttctttgattcatagtttttcctttacgtccatgaaagtgattggcctgttattttcctttcttgtaatatgcttgctaggtttaagtacctgattatgcaggcttggtaactggcttcataactggaatttgcaaatgggaaattttaaaattaaatttttatgtatttaatacacataaaaatgtccatttttaattggaatttcaacattacatttttccagattttccgttttggagtcagctcgaatcatttgtgtctttctaggaattggtctattgcatctaaaattacagatgtatttagataaagttctatttagtccctatggtatttaatagtagtttattagctaccattgtttgaaattgaaaaaaatgtgacatgaactaagaatttctaacctctctagagaaagcaaatgatctgatgatccttagtctgtttttctacatagtaaccagagcaggagtcaagttgccctgttttctctagcacaggctcttcatttagccacagtccccattactacctattctgttacacctacattatcttatgcattttattaggtatgtacgttagaatttgtgatttcttgtggatgaaaagttgtgatgtcaagagttggcatgagacatagagggatatttatcttctatgcacttgctttcaaataagataccttttggagcccgtgctcagtggctcacgcctgcaatcccagcactttgcgaggccgaggcgggcagatcacttgaggtcaggagtttgagatgagaccagccaacatggtgaaaccccatctctactaaaatacaaaaaagagccaggtgtggtgtctcacacctgtaatcccagctacttgggaaactgaggcacaagaatcccttgaacttgggtggtggaggttgcagtgagccgagatcgcgccactgctctccagcctaggggacagagaaagactctgtctcaaagaaaaagaaaaaaaggatacctattggaatatggccctgttgtttaaaattgtaaaggtaaaaattttcaattcttgtataaaacataagctttatcaagtatagaaaaaaatgcaaaaaaaattatcattaattgtccttctaaaatgtttcactgtgttctatattaaaattctatcatgctccagatttatcacatctggaataaaggctgatttttttatcgactgagctctaaatccttactatcacaagcatctcaataattcatcacagatttaagagcactttcacatttattgatctatctgaccctagcagttacctgtctaggagagtctgtactattatctctatttcactggtgagaaaactaaagcacagcaagattgagtttgttcacagatattacaaagttgggcaacagtagaactgaagtgggaatgcaggaagtttatactttatgtaatgattagcagattgaaagatccaaaaaagatggttctaagacaaaagttgggtggggaaagccacctattgataacgacagtagtagtattcagttttgggatatttgtgcaagacattaacctcaaaggtaaggagcccacctcaaggagctcagagtctgcgaggtataaaacgataaggaagaggaaacctcaagctaccaaggaatgcctgggaatgtgatgaatgctggaaggaacactgttacgctggaatgctccttagaactcctgctctttattttctggtatcccaattgaacagactggtgggagctggagagtacagagtttattaagctgccaaaaaaaaaaaaaaaagacattaaataatatcctgcaaagaataacagcagtgacaacaacaaaaggcttttccagatttattcattagcactttgtatactcacacaaataaataatataggaaactgactgaaatagcgtagagaagaacatgcttcttcgtgttaaaatctcactacactttcagcacaattgcaaaggcagaatttaatgaacaaatcagtcatacttaccttttaaaaataagtcctgcaaaggccacatgttcttaatctggaagtgcaagtatttgctgacgttttatgattaaacaaatacagagttacagtgtcaaatgtttttgaatcaaattataacattaagcttcacatccttgtgaagcagattagattaaatgttaaatctagtcaaacttctgctaaaacaaaatatgaaaagactccaaagggattcggcatctggatatctcactgtaggttgtgtagcacaaattagaaggcatatcttttataatgaatgccctactgaatgaataccattatgaacgagcatgaacttgtagccaaatggatctgaggtcaaatcccagacactcagtactgtggcttctgtgacctcagacaagttacttaacctatctgtcagtttcctcatctgtaacctgcccctttggaagtgacagctaaaaattccttgagttcagacaggagattattacaggatcatttaaatagaagtaagaattatacttttgaaaaaacttccagtagttgtttcataactcatcaaaataggtttatccgccctgtaccatatgttatacagtgaagatataaggtacaccattttatagtatggtgcttcagttcagtttgtagaaatgtgtaaaactgagaaccaagccatacccttggctaaacactattcagtaggactctgccacatttctgcctcataatggatttttgtttttttcaatggtttttgatgtgatttccatttcaacatcagtaagagtaagttgcttatacgttttaactgcatagttgttgataaagtaagagaaaaatcaagaaataagggattttcagagggctcattacacataaaattcatttagcagagaagtgtattatagggtcttaacctgcaataaaataagatgggttgttttctgcctccctctttcataaagccccgttgctgatgcattgtgtggtccatggcacataattgtttccgccttagtggatatacgcctgggaacactctatctcttaacgccaatactgatgggcacagtttaggtttcatattctatccctggctccagtaaattcaagggtcaccatacttaagatttacctcccaggcttgtcagattttcctcagttacctttatccaaatgttcttttagtagccatttttcacttttgaattgaaatagcaactcaaccaaacaaaggaattcagatgagaaatgtccttggcacgtacaacaatatgacatgtgaattaaatgggaggaaaaaatcctccccgttgtggatctgagcatggacgataatggagttgtgatttagtccatgaaaatgttagacgaagtgagctgacctttagcttcacttactgctgagacaaaatgagaatataaataaaaattaacttcttttaccattttgtgagactttgtaattcattggttttacatttatgtgtagaatgtttagctctataaaaatatgcattattgctaaaagctcaagggattcctatacgtaaatagaaactcagagaaacagagttgaagttacatattttttttttctctagagaagaggtttctaatcctaatacagtggttctttaaaaaatatatgtattagccccattttatccaatttcttacacttgtctaacaattttgttatagccattcaggcaatgataggaaccagcatctttgagtgattccagagctgagggatatagtcttccaattgctttgcttcattctttgtaattcaaattaaggccaatattgctaagcaataaataggtaaatccataaatttaaagcacttcgtgtattatctatttatacttgtgcatatggcatcacaaaaatgtatgggcagatgtttacagcgtatgagcaagtaatttctaattcacttttccgcttacactgagatcagtggaaagcactatgcctgccttgctacagaagtgacttagattcaattcattgagtattttctaagagtaagataggtttaagcaatagaatatgttactaaaggatatgtgttcatgctgtcttgtgttggaaacctttaaagaatatacttgaagactaaacatttattcgtaaagatttaatgggtgcctttctacagtgaatacagtaaaatagatgacccttggcagttcttagatttgatgtaagaaccatgatcaagcaaattgtaaacaacgaccaactcttaaataacttgtttcaaattaataatactttcccatacatactcttgtttaacatttgcaattctttaacgggttggtattattattcgacagacatttagccaagtatttcttgaaaaagaatccatctatcttaattgtcttttgtattactcctttgtgagggctatcattaaaaaataacatggactggtggcttaaacaatacaaacactttctcaccattctgggggccagaagttcaagaccaaggtactggcaaggattggtctcttgtgaggcctctctccttggattgcagatgaatgccttgttcctgtatcctcacgtggtctctcctctgtgttgcacatatccctggtgttttgctgtgtccaaatttcctcttctcataaggatacccatcatattggactagagtaaccctaatagactcattgtaacttaatggtctatttataggctctatctccaaatatgggcacattccgatgtagtaggtggggcatagggcttcaacatggatttcatgggacacaattgagcctgtaacatcttctcttaatatttggcatatccagatatttggtacatatttgttatataataaattcatgatcaatgaatgaatgcattgatggctgtcattaactgtaacctagatattagctgaatcataaacttgctccattatttggatataaagaacactttaagtggcattttttaaatagttatgttaaataggttgcctatgtacctaaaagagtgtttaattacagcaatccctccctccctccctccctccctccctcatccatggttttgctctccttggcttcaattactggcagtcaaccacagtcagaaaatattaaatgaaaaattccagaaataaacaattcataaattttaaattgcatgctgttttgagtagcataatgaaatcttgtgctatcccacctctgtctcacccaggactgaatcacccctttgtccagcgtcttcatgctgtcaatgttacccgcccattactcagtacctgtctaggttcttagaaacactgtcatggtatcgcagtgcttgtgttcaagtcaccctagttttacttagtcatggccccaaagtgcaagagtagttatggtggcagttcaaatatgccaaagaaaaactgtgaagggttttctttatgtgaaaaggttcccaacttaataaggcaagaaaaaaatcgcatgctggggttgctcaaaatctgtggtaagagcaagtctatccgtgaaattgcgaagaaagaaaaataaattcataaatactatatatagggttttgtactacctgcagttttaggcatccacctgaggattttgaagcatatcccctatggataaaggagaactactctattagttttttgtgactcatacagtgaacaaaactgcaatattaaatgcatcccattagtacatctcagaatttcaataaatttgaaaatgttatacaacctggaataggggatctttatttggatttgtattcccactaaaattaataaattatacatttccacctatggggttacaagcttaaaatgctgcttcagtggatactatatgtcttgtagcactagagagaagatgctatatatacttgaaagtcttttttgtttatgaatatgatgctatagcttgagtttgtcccttcttcccttgactgtcttcttcactggagttgatgggctacaataaatttcccacattttgactttgtagatctgcatcatcacgtcaggtagatggtgtagtttatacttaagagataagattttctccatttgaagcttttttctcccacaactaatctattaaccattttgttacgtgccattttacctgacatgcactgacagggtcactaggaagttagctaaaaaaatgcaagtatgttttagaaaaaacctatatatactgcttcgtaataattagatggttgaagtgactaaattcattgatttaagctcgcacatttcctgtgggtatctcgcatcactgtttgagcgctatggcttttattgtaaacataattcaaaataagttgagtagaaagtgaaactacaaaaaattaacagttacattatgctgaaagcaataacattgatatttatgaagaaaaactgaaaactcacttatgattgagctgcatataagtacatgattatgttaatactgtaggaaaatgttgactgccttctgtttacccatgcgtgtatttttttttaagtggtgatagattaaacaatttaagaaacgtgactctcctagtcacttagaaataggtggattagggccaggtgcagtggctcatgcctgtaatcccatcactttgggaggctgaggcaggtggatcacctgaggtcaggagttcgagagcagcctggccaagatggcgaaaccccgtgtctactaaaaatacaaaaattagccagacatggtggtggatgcctgtaatctcagctactggggaggctgaggcaggagaattccctgaatccaggaggtggaggttgcagtgagctgagatagtgccattgcactccagcctgggtgacaggagcaaaactctgtctacaaaaaaaaaaaaaataggtggattattttcatgatgctaatttcatttgcattgtttaaatcatgtgttaatatcctctaggtgggttaatacacatatgtagtataaagtaacatagaaattatgagaccttagacactgagtagatttttcaaaaatatgagttataaacatttttctaactctaattctatataaaataaagcacgtcaatattttatgatttctagctttaaaggtccaatatatatatgagaaaataagtttcttatttatatgaaaaagttacaaaaagttgaaaattcaggctataaagtgcatcataatgaggttgagctaactgccattttgaaatgcttcctttgcatagaaagcatcacaatatttgttttccttccaaaaatcattgatagttggtttatgttacatattaaaatagtgtgtgttcttagacattagtgacatgttaatgatatagtagtttttactcagagattgttagttttctcactagagtagtttagaaacagaaaattttaatacttttgtaataattgagaaaattgaaaaatctacatagtaatagaatttaagttactaagaattttcttctacaatccaaatggtaggcaattctcattatgcaagattgtttcaattaagagtcttttgaggcattctatttagtagttagacttttattctttagggtgtattttcaaacctaaggaaaatacaccttttacttgttctcactgcaaaatcctctctatatgtatgtctttgttatcttacatttgctatggagccattttatatagtggtataataaccacttcatattgcttgtctctttgcttttctatgaaaggtacaagacttggtgagataaagacaaatgacagtcacaccacttatttaaatgtaagcagatcagaaagagtgtcccttccaacttctagcgtacataggagactgagatactttggcaaattattcatgccatttttaataaaacgtagttaccaattgtttgctgatgctgtgcttgattgtctcttctccaggtattgggagatcgatgggcaaacatctgtagatggacagaagaccgctgggttcttttacaagacatccttctcaaatggcaacgtcttactgaagaacaggtgtgtcatgtgtgagaaactagctgtaaaagacacggggggatattaaattggaaaagtaaagatttatgtttatttattccttggaattctttaatgtcttgcagtgcctttttagtgcatggctttcagaaaaagaagatgcagtgaacaagattcacacaactggctttaaagatcaaaatgaaatgttatcaagtcttcaaaaactggccgtatgtactttctagctttcaatggtcttataaaaacccagtactgtatattatcactattatttagtctcttctatgctattgaatattaaatgtttatttttgcttggatcatagattattcaaagatgttatattgctacttttctgaattaaagtgggaaaaaactataggtggattttcaactttgtttttcaaagttgtactcttgataaaacatagcataccagaataagacttcaattaaaattaataaagtaatactaagaaatgtctgtgagcctttcataaagttctaagcagcatagttctaaaaaaatagactgacgttgattctcagaataatatgtgagagttacaagcgacggttatcctgacattgatggagtttaaccttagtttattataaaggggtacctgagactgggactgggtaacttatgaaataaagaggtttaactggctcatggttctgcaggctgtacaagaagcatgacaccagcatctgctcctggtaagtgcctcaggaagcttacaatcatggcagaaggagaaggggagccagtgtatatcacattgcaagagtggaaacaaaagagataagaggaaggtcccagactcttttaaacaaccagatttcatgtgaactaactgaatgggaactgactcatcatgaaagggattgtgctaagccattcatgagacatccgccctcatgagccaatcacctcccaccaggccctacctccaatgctgggaatcacatttcaacatgagatttggagaacagagatccaaacaatatcacctagtttttcaagcaaaaaaaaattaaagcctatcaaatgacattgattataaatacctcgagtgttttgagaatgagatttctttggcaataaatggatttcagaaaagacttcattgaagcatttggtttcagcaggaatttccaagatttaaaaaaaaaaaaaaaaactctaaagtttctcttactctgtgaattttatcatttctagtaaaagaggccggtctgatactatgagtttaatttttcacgtgacatattctactttatgatttcttaaaatttttgatagatttgattaaatgttcatttgatatgaacttttataaaacaaaatggttgtaagtagtgttccataatttcacctttattattgcattgtacttcataataatgcaataatttctaaacttaagtaaatttttccactcattttaaatacgtaccattttaccagctatttatttgtttcatacattttttttgctccataaatgctaaccctcattggtcttttaatttaaaatagattcacttatgtattacttgttattacaagctagcttattattgataagaaattattgctcaaagaatatggactttattaagtgatgtgactgccgaaaatagagttcagaaaagtaacctgtatatgtttgaaaacacgagtgcaaaaatatcagctgtatttgtagttttggcctgcagctgatggggagccattgagagtttgcaaaagaatcatatttgcatttttgtaattctttttggtaggaagatgtttgatggtacgaggactaatcagaagacctgaactaagtagcattgggcattaagataagaagagaaacattagaatgttaagatgtgatgaatgaaacttgtgataagaggcagaagtttgaaatggttcctagacatttcatttgggtgactgggttcctaggagggttattagccctaacaggagaatagaagaggaattgctggaatgacaaaaatgataattatttcagatttggatatattccgtgtaaaatgtctttgagacatccaagttaaaaatcctttccattaatcagttggtttacacaactagaatctcagaaaatggttcatgactagttattgattcagaagcaatcaaaatgcttctgagggattgtgtagagtgacacattaagtgaaacgaatagatttcagggaggaatgtctacaatcaaggagtaggcagaggataagatgttgaccaaaagattgagcagataccacaaggggaaagtggtatcacaaaagtgaggagaataaagatttcaaaaaagtaggaagtggtacacactgtcacatgccacagagaggagaggataaattcatgagggattctatcatatctagaggaatggatgcatggattacatctccttaaagcagaatattccttacaaacattgttcttctcaggcaaaatgtgaatcctttcagtaaataagtgagtgaccactgattatcaaaatgcagtcatgccctctgattaggagcgaagatatattgctagttaaatacagaatcatgtgcttcagacggtcaatcataatggtgatggtcagtcatattctgtgtgctgaaaaagtcacaagcctgcccagattcaaggaaaagggaattagatttcatttcctcatggagaaacaccaaggtcaagttatagcaaagcatctgagatgaggatattttacagccatctttggaaagtaccacatgccagaatagtacagttattttacatgatgataaattccaaatcttaatatctagtcaaagttcctgcatatattgttgactagatttaccaatcaagaaagttgttcttaggaagccacaaactgacaaaatccaaatatgttaaagctagatgagattttgcatctcatctagtgtttcttcaatctcattacacatgtaaagttcattaggaccatctactcagtttgtttccaagagaaaatcgagatcaagaaaaaacacaggatctgtatcctacaacattagtatcagacttaaaatgaacactaagacatccagactcaggtccaggcctttcaatctatttcagtagtcctcatatcagttgattccttggaaaaaataactgcaactgagaactgtcatttctaacaataatgtgcctctatgttaacatttttgtgagcagaaatcttggctagcctcagggccataaaaatgctcttttaagaaagtcaataattttccaataggattaaaatttgtgttatgtcaccttgcttgtgaacaaagagaaaatatgttttctataggtcttgtcatttgatagtttaagccaattaacaaaacctgacagctggtctagaatttgaggtaaaattcctttgctgactcaggcagtgaataagaatttaatgttcattaaaatatgtcacaatctgagacccaaaacaggtaccatctgtcaccagttttcactacatgtctaggtatagatacactgtgctaaactctcttctctttacaataagtgtaatttgtttcaaaatagtatcactgataacccatgggattgtgtcctgcttgccattgaggtgggaggtggggattatgacatttaatttgctctagatctttgggattcatatccaaatcatgtagatctattattttttataatcaaaactgatttaagttttaaactgatttggcatcagggataaaaatgaagggaaagaagaaacagtagcttttatgaggtgaattataagacttgtagaatcacgtaaattatcgtgggaagatccaagtcaagaagaaacctgttcctgagtaaatgtatttctgctgtggggactgttggcgtttgctggggaaggacagctctggggaagcagggtgatccaagagattatggtatataagggctacagaagtacttaggaattgaagatattctcaaatggctgtgggatcaaaggacatggatgaagtgctcatggtaactgagcaagttcctgtttgacttgctacctttacctcaactcctgggatggccctcaaataattaattcagacaggatcaatgcttctcaaaatgtgttcccccgaccggcagcatcagtatcaaggaaatttgttaggaatgcacattgttaggccatcttcagacctactgatttagaaactctggaagtggagcctagtcatctgcattctaacaagcctttcaggtaattctgatgttctttcaagatgagaacctctgtaatagatcaacctcccaaagtacaactggtgattagaatgaattggagcacatcttacatgtagataagtaactacacataatataggtggaaaactcaattttgccaatataggagaaattgtcttggcattattctcttatgcgtattcctgatgagagtgaggtgaaggtttcctgggccttttgtaaggatacattatcttttcacttcaaatcatcttgaacagcttatctgtctcttctccatatccactactgacccagtctgatttattgactgtaccttcctccctaccttggaggtaggtctacattcctggcttctataaaaataaagtctgtttattcttttactatcccagctggcctttgccttgtacacattctctagatcttccttttgccacctgaattttctagagctctatgggtctctggcactcatagacctatggttaattattgatatgtagaaatacatattttatgcaataattagtaacaaatcatagttatttaatatgcacatgtaagacctaagcttaaaagaatcagcatcaatggatagacaggacaaggtaattctaatgaattctatgatctaatgtatctggccccatcatggattttctttcttttcctccctcagttaataatcctgggggagttctggaactgggagatgactactgaaagacagaaaaagagagagaaactgagaccaaacaactaatctgccatcatcatttttgatactcatatctaaaatttactaggtataagtctgggttcagtgtttttgtcatacagacatataaaaattcatttattcaataatcacacaatgtaattataacattgattttactttaccttgagtgcacttttttcctaattggatttttttttttttcttgagatggagtcttgctctgttgcccaggctggagtgcagtggtgtgatctcggctcagggcaacctctgcctccctggttccagcgattccttgcctcagcttcctgagtcgctgggaccacaggcatgcaccaacattcccagctaattattgtatttttagtacagacgaggtttcactatgttggccaggctgatctggaactcctgacctcgtgatccgcccgcctcagcctcccaaagtgctgagattataggcgtgagccaccacctctaattttatttttaatggtgactttcactttcatttttgtaatgcttaccaaatgtttcttcatgtggcttaataataaaacaggaggcttattttcatttgtttaggtaccatgaggttactcataggtttttattgcaatcctcttctttaaacataattctcacactcctcttctgacatgtttccaaatcattacatattttgtttaaataatgggtagaccattcagccttacacatatggctatttaaaatagtttctaacattctgagtaagtaagtcaaagaggattgtacttagattttttttttatttttagatttgtgtctttgtgtatattgtgcctctttccatagtaaagaaaaaaaatgacactataactggaggaatatacattgaaattcaaatatggctctcagcttgggacaggtagcatcaacctttgttctagtactaatgcaaatattcacttaaatttaatggaaaactaacaagtgaattaaacaaaatgaatatgcaaaacctatctattgggctgggtatggtggctcatgcctgtaatcccagcactttgggaggccaaggcgggtggatcacttgaggtcaggagattgagaccagccaggccaacatgttgagactcctgtctcttctaaaaatttaaaaattagctgggcttagtggcatgtgcctataataccagctactcgtgaggctgacaggagaattgcttgaacctgggagacagaggctgcagtgagcagagatcatgccactgcactccagcctgggcgacagagttagactccaactcaaaacaaaaaagaaaaaccacctacctattgctaaacccccacaccgtgagttttattttgatttgaattcagtgtataatatcttaatttgtattttggtctattgcattctttcaaacttagaaaaatactgaacttattgttaaggaaaaattagagatgaaacttaaatcttgctttgtttccccttaaaaatggcatgaagactgaactataacatactccaggtgaagcagattctgagtaaaagacaaactaattgaaggagccactagagcattctgcagttcagagctatcaatgcaggtgccatgccaaaatgggctacttagattgtccttttcaggaaggtgtattgactgctctaggtttggggcactttgcttcatgggcaattggtgcatttgtgtcatgacaatttgctctgtggtatgttagttcttaaataaacttacatttgtttcggaaagacaggtatcgcgatttagtttacattcattgtatttgctgccaaatatggggttgttaagtggctgtaagataattttctcctttatttctcttccttcttctcctttgtttacagattaagtcagggagtaatgttcagtacccaggaattgaatttgtctgtgtatcaggcaaagttactgagtcaagtaaaagaaaaactgccctgatttactgatttcacataaaccacttattcctttcaaatcaaccaaagggagtttgtaaccctccacagctcacaggaactttggaaatataaatggtataaaaattgcttcataagacacataagtatttataaactctgaaaagagatgctgaagcatttatgtcatgcccagcgacttagttcttttacttaatgggctctacaattagttttaaaaaataattactcaaataaccagatgttaattgattaatggatgctacaaaaattttatggtcagtaaatcacataatgagattttatctccaaataatgaaccgaatgttaaaactgtggaaacaataatattgtaattttatccaaataatcacagcatttcagaatggcaagtttccttagccattctcattttctcagctcactagcttttcttcagtactcctggtacctgattgtcagttttcgtttgaattccgtcaggaattaaggggaaatccaagatccgtgccttctaatttccacatgttgatctctgttttgccttttgaagcaatattaccttttcacttggattttcttcaaatatttcaaggtagctcttaattacctctagtaggtctttattctacgtttgagtttcttttctcttcttttctcttcaaacttcttgggataattagatagattataactttctacctctatttttctgaacttttgatcctttgcgggcacgattgaaatattttcttatctatgcaaatgagcaaatacacgcaaaagcagattgaactatagtggtgtatggaatgcaacccaggcttattctgtgatctttcttgttttaacaggttttaaaagcggatctagaaaagaaaaagcaatccatgggcaaactgtattcactcaaacaagatcttctttcaacactgaagaataagtcagtgacccagaagacggaagcatggctggataactttgcccggtgttgggataatttagtccaaaaacttgaaaagagtacagcacaggttagtgataccaattatcatgctacagactatctcagagattttttaaacctgcattaagagagtgacattataaccctacaaaagaagcaaccagattagtttttgccctgtgtttagttaaataaaaacatgattcttttgcctgtcttgttgttggagaatggtggtgaggtagagtgctaattaactgaacttgttactgccctagagtgaatttcttccagcccaatagtaacggggaactgagtgacttagagcaggcgaacaaaatgctgggaactgtataatcacagtctaaccccaaatcagagattgctagaaccacgaggaacattagccaactccgttttactcttgagaaaaatgaaacttagggaagaaaagtaaatttttcaagagaagttagtggtaggagaactagggttcaggtcttttgatttcttggaaagttttttattagtgtagttaattatctgactattgtaccttttctgccatagactgctgatttcataaaattatgaatgtggcttagttatactaacacatacgggctgtagattatgaaaacatctcagctacatttggggtatgtggttttattataataatttttaaagatttagtcactaaaatggggtatcgttaaaagttgaacctctttttgtcttatgtagttggatggtagaataatgagtagtcattcaagatataaacattatatataatagtatttaacatattctgccacatagcctggcattataaggaataactttactcaaaattcatagctcaatgcacaggcatacacttccatattcaatagattttaggcaaatatttcctctatattgagacaagtacatggaatttgttttcttgagacctgacatctgataagtagcacttaggaaatgccttttggagacatgaagtttgtagtattgcctccaggaatacaatttaagacagcgtaataaaccagcctatatgattttcaatcacagttcaatgttacttttaatccaattttacgttaaaaaattataatttgaagaaatatgaatataaattgtaataatttcccacacaatcattacataataaaaactccatttgttttccattaaacatactttagcaattaattgacctaatagtagttttagtactatattatgattcctcctgttttatgtgatctgcccatggcttctttgcaatacattggtatttatgtaataaatacatgagacattagtcaatttgatactttttaacccaacactgagagtattcccatatgtacccattgcttccacagattattgctgccataaaatggtcagttgccgtgttaagaaagattgccattatttgataaagaaagttattttgacgtgcatcccttttaagggacatgtttagggagctgtaacagttaactgtaggtcatcttctagttcatttgcattgcatggagtggttctcaaacttgagtctgcatagtagccacctgaggagctaattaaaatgcatattcctaaacattttgctcagaaaatctcatccataagctgtgataaggacctaaaaatctacatctttactaagcctttgatacaatctgcagaccatagaggggatcaacatacactgggatctacttgaggtgggagggtgggaggaagtagatgagcagtaaataagactattggatactgggcttaatacctgggtgatgaaataattggtaagcaaacccctgtgacacacatttacctatgtaacaaaccttcatatgtactcctgagcctaaaataaatgtttaaagaaaatagacagtgatatgtgtgtgaatcccaacattctggttttccacaatgctccctgaaatgtgaaaagggagagcttcttgggaatacactatataaatatgctcattcccttggaatgggactactttttgatgaagtttgtacatgtcatcgaaatattactgatttgattattccaattggtagaaaagcatttgaagccttatttttaattccctagaaattatgagaccaccacctaggcaattgacgtgatgtcttccaacttgtataattctataataaaagaatactggttttgatttgcatggttctttatgaaataaagtccaacatgcattacagcatgtatctcttcacttgctcatagggatacaatgaagataaaatggaggcatagacaagaaagcatttgaggggaaaaaggttgagtttgatatgtaagtcatgtagttcagtgtgtctggagggctttttgtggttctctatctgcttttttttttttttttttttttgagatggagtctcactgtgtcacccaggctggagtgcagtggcacaatctcagctcactgcaagctctgcctcctgggttcacaccgttctcctgcctcagcctcccaagtagcagctgggactacaggtgcctaccatgacaccccactaattttttgtaattttagtagagatggggtttcaccatgttggccagggtggtctcgatctcctgaccttgtgatcctcccacttcggcctcccaaagtgctgagattacagacataagtcaccgcgcccggcccactatctccttttaattttattttcaaacagttacacgctcctattgtgggctagaaataaataaaaggacttaacatcatgtaagttgttttccagaacactaagcttgagtttttcttaagcttatgtttcagttttctctcattgcctttccaaaaattatgctgtcatgggattgatccaaatctttgctggctgtttttgagctcacaggaaggtagaaatggagctactcaggaaaagagaaattaaaaggaggtaaacagagacaacagcgaaatagtatcatataagagcaactgattttcttttatccatgttaaattgaccttgattaaaattacataaggagaattccaagaatatgagctgtaaggttgtgactttgaagaacaaagctcacttgtatgtacattttctataatgattgtgggagaaaaatgagtttcattaatgactactcacatgatatactcaattgtttcaaaaattcttttaaataattagtataaagaatgagcaaagttctcataatggttaaaacctattgtgaggcagggtgtggaaatcgtgattgagatgacaaggcacccagttgtactcatataaagaacactgcttgcgcgtatgattgctgttcaggtcagagctttgaggcatttttgaccttttgaagcagttgcatggcaagagatcaaaacgtgaaaaaataatcagctaggaggactgctctcttgcatttcaaactcagatttgacttgaataatacctggacacaagctgagggtatttaagttgattagaaggtagcctaagaagatagaaaatactttttttctaaatgttggagagataataactcttgctatctggaggcttacaatgagaaaagagggcaaatataccctggattgacttctttaaaaactcaaatgatcatgattccctgtaattttttataaacatacttgtaatttgtgcagttttttctaattgccttggccctgatcgatatatattttatcttgatcataattatgaaatacgatagtgacgaattccatcaacatttgcttgtctggaaaagattttattcttccttcacttatgaagcttactttgtctggatatgaaattctgccttggaaattcttttctttcacggtgttgaatattagcccccaatctctactggcttatagggtttctgctgagagatctgctgttaccctgatgggcttccctttgtaggtaacctggcctttctctctggctgtccttaacattttttctttcatttaaacctggagaattgtatgattacgtatgttggggttggtctgctcagtatcttgcattccctgaatttgaatgttgggctggcttctgctcagtgagtatcttgtatttcctgaatttgaatgtttggctggctttctagattggagaagttctcctggatgatatcctgaagtgtgatttccaacttggttccgttctccccgtctctttcaggttccccaaacagtctttgcttcagaatttacataatcccacatttgtcagacgttttgtacattcatttttattcttttctttttctctaatcttttctgcctgtcttatttcagcaagatagtcttcaagctctgagattctttcctctgcttggtctattcaggtattgacaatgtgatttcattgtggagttgtcgtattgcgtttctcagctctatcaggtcattcatgttcctctgtaaactggttattctggttatccgctcctgttacgttttatcgtggttgttagcttgtttgcattgggttagaacattctcctctagctcagggaagtttgttattatccacctttgaagcctacttctctcaattcatccatattagcctcagcacaccatctcacgccagacagaatggtgatttttaaaaagtcaagatacaacagacgctggcatggtttcagagaaatgggaatgcttttacactgttggtgggaatgtaaattagtttatccattgtggaagacagtgtggtggttcctcaaagaactagaaccagaaatacccagcaaggccgttactggatatatacccaaaggaatataaatcatcctattataaagatacatgcatttgtatgttaattgcagcactattcacaatagcaaagacatagaatcaacccaaatgcccatcaatgatagactggataaagaaaatgtgatacatatacaccatggaatagtatgcagccataaaaaggaatgagagtatgtcctttgcagagacatggatgtagctggaagctgttattctcagcaaactaatgcgggaacagaaaaccaaacactgcatgttctcacttataagtaggagctgaacaatgggaacacatgggcacagggaagagaacaacacacactggggcctgttgctgggagaggaggagagcatcaggaaaaatagctaacggatgctgggctcaatatctacctaatgggtctgtaggtgcaccataccaccgtggcacacatttacctccataacaaacctacacatccaatacgtgtaccctggaacttaaaaaaataaatgtgatagtaagaaatttattataattaatattttaaaatataatgtatgtgatttgaagcattactttcctcatttgactgaaatcacatgtgctgttgaaagggtatattagtcatatgctttacaatttggtatgctaattgtaattatcatattacgccataaattgtaattactgtatttaatatgtaatttatattaagtagtatataccaggtgctttggtgtaagcatatatatatatattttttttttcaagcgagtctaaaggttttgtagttttgtggatttttagtagaataaattgtcttctttctcaggaataaggaaagttgtatgacttattaaggttcaaatatctcattcccattttgtgaatattttgctatattgctaacaacaatttttgcaacattctcaactgtgagcacctctttaagataaaatacatatgctcagaatttgcctcttcttgtacatggcagttcatgtttatgctgtatatgtttgtgcctacattcaaggatgcccaaaaagagaaaatgattattatataattatgtgtaccttctatatcatctatatcctgatgagagatttattatgtgtgctgccgaagcaagcacctgatgggagatttaaaactcctatcaaatagtaatataaaacatagctgtaaatgataagccagtgctttttattatacccaaaatgcaaatagaaatatgccaatgtaccaagatgaaaatttctttacatgttcttcttttctgagttaattctcattctttaaagatcctctattttaacccttcataaaatattttatgttcacgttctggctgtacccattctcagagcatcattttgtagacctctttgtacaagggggatatagttgcaaatggtttgcctctcttcttttttggccagtaagtttaattaaaaatactctaaggctttttatttaaaagaccttttcattgcttcctgaaagctctccacgactagtaagcctgatgccaattaaaaaagaaaataattttttaaaatctggaattaaaataaaaataccttacttattttgtgtttccttcttacttaaggtcatagaattaactcccttaaatttgagaacatgttttgggtaattcctcaggttaaagttttattagaaaaatttgaagttgaccgagtgtggtggctcacacttgtaatcccagtactttgggaggacaaggcaggcaaatcatctgaggtcaggagtttgaaaccagcctggtcaacatggtgaaaccccatctttactaaaaatacaaaaaaagtagccaggcatggtggcaggcgcttgtaattgcagctacttgggaggctgaggcaggagaattgcttgaacccgggaggtggaggttgcagtgagccgagatcatgccactgcactccagccgggatgacagagcgagacttcgtctcaaaaaaaaaaaaaaaaaaaaaaaaaaaaaagaaaatttgaagttacatctcaaataactttggaaattaactgtatcattttgctatctccaactataataggtatttgagaatgggccttgtatatcagtgcaataggttttaccttgtaaatgcattgtctgtaacaatataaaatgtaagcactaaaaaatttaatacattcagtctgagttaactcttggaatctctcattctttatttataaatttaaaggaaaggtaagctaggcagatttctatagtggccatcgagttctaaatgtctttgatatgtttctctttgcttttatgtgaaactctggagtacttagtgaagaagattcctacttttgccactggaaaggcagctaaaaaataatgataataacatcctatccctattcaaaggagacttaattatgaaattattacactgtattcactgagtatgtcattaaaataccatacagacaaaatgctcagcatctgtatgatacgcctattatctcctgacaaaaaaatgaaataacacataaagacaaatacaagtctttttcctaagcctatacttgataatatccatccctaattatagaatgtgtttcattacttcagtgttagatggtatgtagaggaaggccagatggatcagaaaaattaaatctcattgctttgcaatttttgcaggtgcagttaattcacacagttgctcaaattccgtatttaatatgaatccagaagacaacatacatctcttctttctgatacaatttgtactaaagacaatttaaaatgaggaacaaaatacattaaattggacagacagttttacagaataaaccttcttaattatcatataatatttatttcgaagaaacaaatgacttatgatgccttctaagtatttgacaataattttgctcatgatttcaatgtcagtacttattcaagaaattttattaccttacagtaataaattaattattaatataaattaaattattattaaattattgtaataataaattaattacagtaattaatagtaaattttagttaccaggctactgtcctgaactttggcactcattgtatgctacattcagctatgggaagtcctctatacttcataagataaagcattttacatccttgtgattagtaactcagcttcctttgtgaccatctgatcttttgcccaaggattctcccaaagttcaacatataaatattttcttttgcttagagatgcaaatctttaccagatttttgtgccttgtgctaccatgcctgtggagttggtttttaagcatggctatcaattattatctaaagctgttgctatgattatgcagtatgttttaaactgcagaagtgcaattcctccatgcccattaaaacttattgatcactccaaagggttacatatacatagacagacaacgcaatgaaaagccttgatccacagttgtcaacctgattgtgtgtgtgtagtgtattttgactaattttgcacagatttcaatatagcatgtcaagagccaaacatatttaacattgagtaattcttcctatataatagttatgatgtgccattgtttacaatttcagtattctgaatttatatatgtgtgtgtatgcatacaaatacacaccccttaaaaggaaaccaccattcaaaaaagtgtacaagtgtaggagcaagtgagcatagctgataagagttggatgaatgaacattcagacttggatttatatctatgctttgctactaaaaagttttatctgcctcaacaaggtcactttcatctataaaataggaataatattagtacttactcttagggccattgtgaggtcataatagctaccatttattaaagctttacaacatagcaagggagtttttctagatcttttgaataagataatcaattcaaaacacttattgtaatgcctggatcatgcagaaagcttcataactggtacctgttattgcaagtattagtatttgcaaaataaagattttatgctaaattagtaactaatactttatagcttgaatctttctagtaagtatctaaatattcaaatactagaatatctcaaaaggcaagaagttgaaatctcttatcccagcataacaaaaaagttacaaaggcaataatatgtaaataattaaatggaaagttaaaagtttcaattaagaatatcagtcaaaaataaaaggaaaatttattagcctgttcttacactgctataaagacatacctgaaactgagtgatttatgaagaaaagaagtttgactcgttcgtgtttgtggcattatagtattccttggtgtaaatgtaccacattttctttatcttgtctatcattgatgagcattaaggttgattccatgtctttgctattgtgtatagtgttgcaatgatacacatgcatgtatctttataatagaatgatttatatttgggtatatacccagtaatgggattgctggcttaaatggtttttctgcctctaagtctttgagaaatctccgcattgtcttccacaagggttgaactaatttacactcccaccaagagtgtaaaagtgttcccttttctccacaacctcaccagcatctattgttctttgactttttaatagtaaccattctgactggcgtgagatgttatctcattgtggttttgatgtgcatttctctcatgatcaatgatgttgagttttctttcatatcgttttaggtcacatgtatgtcttcttttgagaagtgtttgtttatgtgctttgcccactttttaatgaggttatttgtttttttcttgtaaatttgtttaagttccttgtagactctggaccattgtcagatggatagatggcaaaacttttctcccattctgtaggctgtttatttactctgacggtagtttattttgctgtgcagaagttctttagtttaattagatcccctttgtcagtttttgcttttgttgcagttgcttttgccattttcctcatgaaacctttgcccatgcctatgtcctgaatcttattacctaggttttcttctaaggtttttattgtttggggttttgcatttaagtctttaatccatcttgagttaatttttgtatagattgtaaggaagaagtccactttcaattttctgcataggactatcccagcactatgtattaaataggcagtcctttccccattgcttgttttttcaggtttgtcgaagatcagatggttgtaggtgcgtggtcttatttctgagttctctattctgtttcattggtctatgtgtctgttcttgtaccagtaccctgcttttctggtgactgtaaccttgtagtatagtttgaagtcttagcttttgggctgagacaatgggggttttctggatataggttcatgtcatctgaatacaaaaataatttgacttcctctcttcctatgtgaataccctttatttctttctcttccctgattgccctggtcagaacttccaatactatgttgaaaaggagtggtgagagatggcatccttatcttgggccagttttcagggggaatgcttctagcttttgcccatttggatgtgggtttataatttatggctcttattattttgaggtatgttccttcgatacctagtttattgagaatttttaacatgaagggatgttgaattttattaaataccttttggttgtctattgagatagtcatgtggtttttgtctttagttctgtttatgtgatgaatcacatgtattgatttgcatgtgttaaactaaccttgcatgctagggatgaagcaaacttgattgtggtggataagctttttgatatgctactggatttggtttgctggtattgagaattgttgcatcagtgttcatcaatgatattagcctgaagtttgcttttctttctttctctctttctttctctctctctctctctctttctttctctctccctctctctctctttctttctttctttctttctttctttctttctttctttctttctttctttctttctttcttctttccttctctctctctctctctctctctctctctctctctctctccctccccctccctccctccctccctccctcccaggttttggcatcagggtgatgctgacctcataatataagtttgggagaaatcccttcttttcaatttttttggaatagtttcagtggaaatgataccagctcttctttgtaccgctagtagaattcagctatgattccatctggacctgggcttttgttggttggtgggatatttattattgcctcaatttcagaacgcattattgatctattcagcaattcatttcctttatggttcagtcttagaggggagaaatgtgttcaataatttatccatttcctctaggttttctagtttatgtgcatagaggtgtttatagtattccctgatggttgtttgtatttctgtagaattattggtgatattcctcttcaaatttttcattgtgtttatttgattcttctctcttttcttccttattagtctaactagaagtctaccttttttatttttatttttttccaaaaaccagctcctggattcatttagttttttggagggtttttcatgtctttatctccttcagttcagctctgatcttggttatttcttgtttgtttgctcttggtttgctagtttttttatttgagatgttaggctgttaagatctttctagctatttgatgtgagcatttagtgctataaatttccctcttaacactgctttagctgcgtcccagagattctgataaattgtctctttgttctcattagtttcaaagaactgcagaggtggcagctggtcttcctcccagaagctctgtcccagggagagatcagagctctatccattgaatcctgggtggaatggctgaagccccctcagggaggtcccacccagtgaggaggatggatcagggtcccacttaaagaagcagactggccacgatctggcaagggttgccacacactttcaaacaaacaaatctcatgagaactcttatcaggagagcagcaagggggaggtccacacccatgattcagtcccctcccaccaggcccttcctccaacactgaagacagaattcaacatgaggatttgggtggggacagagagccaaaccatatcataaaataacagcataaacaaaatgaatttaaaattaaagaatagctgaatagttcgtaattgcaactacagtcatatgctgcataacaacatttcagtcaacaatgaaccacatatatgacagtggtctcataatattattatactatattattttttacttttatttttgcttcagaggtacatgtggtggtttgtcatatagataaattgcatgtcacaggggtttgttgtacagattatttcatcacccaggtaataagcatagtacccaataagtagtttttttaatcctcaccctcctcttaccctccagcctcacatagaccaccgtgtctgttgtccccttctttgagtccgtgtgttctcaatgtttatctcccacttagaagtgagaaaatgtgatattttgtgttattgtgttagtttgcttaggataatggcctccagctccatccatgtttgctgcaaagaacacaatctcttttttcatggctgcatagaattccacagtgtatatgtaccacattttccttatccagtctaccactgatgggcatttaggctgattccatgtgtttgctattgtgaataatgcttcaataaaacatacatgtgcatgtgtctttagggttgagggatttatattcttcttggtatacccaataattgttattgctgggtcgaatggtaattctggttttcgttgtttgggaaatcaccaaactgctttccacggtggctgaactaatttacactaatatcagcagtgcaataaacgttcccttttctgtgcaaccttgccagcatctgtgattttttgacttcttaataatagccattctcactggtgtcaaatggtatcttattgtggttttgatctgcacttctctaatgattattgatgttcagcattttttcatatgaatgttttctgtatgtatgtctttttctggaaagggttcatgtcctttgcccactttttaatggtgatgtttggtttttgcttgtaaatttaagttccttgtagattccagatattagacccttgtcagatggaaagtttgcaaaatttttctcccattctgcaggttgtctgtttactctgttgatagtttcttttgttgtgtagaagttctttagtttaattaggtcccagttttcaatttttgtttttgtttcaattgtttttggtgtctttgttatgaagtctttgcagtttcaatgtccagagtggcattacctgggttatcttcttaggtttttatagttgttggttttagatttaagtctttaatccacctcgggttaatttttgtatatggtgtaaggaaggggtccaatgaataggcagtccttttcccattgcttgtttttgttgatttcattgaagaacagatggttgtaggtgtgcagccttatttctcgactctctattcttttccattggtttatgtgtctgttttttgtaccatgctgttttggttactatatccttgtagtatagtttgcagtcaggcaatgggatggttccagcttttttctttttgcttaggattaccttggctattctggctcttttagtggctccaactgaatttttaaatagtctttttcttattcagtgaagaatgttattggtagttttttgggaatagcattgaattaaaaagtgctttaggcattatggccattctgtcaatattgattcttccatgagcatagaatatttttccattttttgtgtgttatctctgagttacttgagcaatattttgtaattctcagtttagcagtgtttcacctccttgcttagctgtattcctaggtatcttatttctttttgacaattatgaatgggactgtgttcttcatttggccttagcttaaatgttgttggtgtgtaggaacactagtgatatttatacattgattttggatgctgaaactttgctgaggttgtgtatcagatcaatgagcttttgggcagagactatggccaaagtatagaacctcatcgtctgcaaacagggataatttgacttcctctcttcctatttggattgcctttatttctctttcctgattgctttggctaggatttctagtactatgttcaatgagatttgtaagagagggcccccttgtcttatgccagttttcaagcacaatgcttctggcttttgcacattcagtataatgttggctgtggactttttaaagatggttctaattactttgaaatatgttccttcagtgcctagtttgtcgaggatttttaacatgaaagggtgttgaattttataggatgccttttctatatctactgaaatgatcatgtggtttttgattttttgttctgtttatgtggtgaatcacatttattgacttgtgtatgttgaatcaacctcgcaaccctgggatagaagctccttgatcatggtggattagctttttgatgtgctgctggattgggtttgctggtattctgttgactatttttgcatctatgttcattagggacattggcctgaagttttcttttttggttgttgtgtgtctgccaggttttggtatcaggacaatgcttccctcatagaatgagttaggaaggagccgctcctcaatttttgggagtggtttcataggaatgataccagcttttccttctatatctgttagtattcaggtgtgaatctgtctggtcctgggctttttctggttggtgggctttttgttcctaatttaatttcggaactcattattggtctgttcaatgattccatttcttcctggttcaaacttggaaagttgtaagtttctagcaatttatccattgcttctaggttttctagcttgtgtgcataggggtgttcattatgaatagtctctaagggttttctctatttctgtggggtcaatggtaacatcccctttgtcattttttattgtgtttatttgagtcttctctctttttttctttattattctaggtagtggtctatctttattattaattatttcaaagaaacagctcctagattcattgaccttttctgtgcttttttgcatctcattttccttcagttcagctccgattttggttatttcctgtcttctagctttggggttagtttgctattgtttctcgttccttgtgatgttcgttttgtaattagagatccttctaactttttgatatgggtgtttcgtgccataagcttgcctcttaacgctgctttgtgtgtgtcccagagattctggtatgttacatctttttaaattttcattagtttcaaataatttcttgatttctgccttaattttattgtttacccagaggtcattcaggagcagtttgtttgatttccattttaatgtatggttttgagcaatttgcttaacattgatttctatttttattgcactgtggtccaagagtgttgttggtataattttgtgggttttaaaaaaattttctaaagattgttttatgcccaactctctatatcatatttttattgtacctttcgatatgtttggatacacaaatacttaccattgtgcctacactattcagtatagtcacatgctgtacaggtttgtagctaggagcaataagctgtaccacataggttggccgtatagtagtctgtaccatctaggtttgtgtaagtacactccacggcgttcgtacaaggacaaaattgtctaaggatgaatttctcagaatgtgtcccagttgttaagttatacatgacttgtagtgattcctaataaactggagacagtggtagaaaaaaagtattttattttattgtatgtccttttgtattctttaaatttgctttgatgtacttatgtttctttttttaaatgtgcattttttaaacaagtggaagagaagatggaaagaaagaacttcatttcttgagcatagtttgtttttcccaggcctatcaaaataacacaatcttactgcaagaagaggcacaccctggaataatatcaggatgctggcaaatgctcttccaatttttctcagaatgagaaaatgtaaattttaaagtttaaatctttttaacatatgtaatcttatgagtaagaaggttgagtatagaaaaattcttcaaatttccctgagcgtttagaaaagatagtggttactgctgatatttaccattatagagcacttattttattcagatattatatcatttaattctcaaaaccaggactggctacataatttgtgggcccagtgcaaactgaaaacaagggcttcctgttcaagacctaagaatttcaagacagtggaagcagagcttgaaaacaagcatggaagcctcctgagcaggggccctgggcaactgcataaattaccagcccatgaagctgtccttgcttgtaacacacctgtgaagaaatgtgttactcttactttaaagatgaagaaaataatgcatagatttgagataagaaccaaccagccccaaatgtcacagtgtataaactatggatctggtgtttaataattgtggagactggctccaatgcctctacttataaccactctaagaggaatcagctcccaaatgtaaagacaagtatttctaaactatttcccatttttactagggaaattaacttgcagttaaaatgaatagtattttaaaaagaaatgtattttcttttcatgatatcattttagagtcttaaatagactcataatcaaaatgaagaaaggtgactgggtaaaagtatagttagctagatacaaagattgttgaatataggtcaaactatattctattctagttttgactctgccatattaaacattttagtgaaggcactacgttattcttatcatgcttgaagttttcctcattctaatgcattgagtgacaggagtatgattccatagatcttaatatataaatagaaatgatagatttaaaacaaacagtttggcaaaactttcaaaatttttctttgcttacaaatgcaacattttgcagataatatcttatagaagaactttggaaactaaaggaatacagaaatatacactgtgcaacagaaattttctctactttctctgtcaaaaatcaaccaatgtttatgtctagcattgtttactcaatagtgtaaagcaaacgttttccaatgacattaaaatatttgaaatataatactccatccacattcatataccataatgtacttaaaccatcatctatgacatgaggttgtttccaaaagttactgttagaaagaccctataaacaaggataaatattatatctagccttcagcatcaaattaaatctaaatgttaaaatgctagctgagagaaatctgttttcataacatttaaagagaaaattacttgattactgtatgtttggtgtatgtaattattttgcatactggtatttttcacgtggcattcatcttcacaattatttgtgtgattatcatcgtccctattttgccgtaaggttcctaaatatggagtttctattttactcatttctgaatgtcctatagtgaatatatattcaataaacattagaattttatagaaaccttgtggttcagctgctgaataacttacacagttttagaattctttgattgactatggtgtccaaagccaagaaacattggttttggatgacgaatcaagttatatctacttctagcaaataactggcattatagagtttgaaaatgatatttatcagggtcatgattattagatttcaaatcttagaatatcaggtagaaatgatattcaatttactctgctttcattcagaactcaaaacaagttttaacaagaggaagtcttaatcaggcaggattcctctggttgttaagaacatctttcccaatggggaaagtttgcttgcatgctaagaaaggagctttctgtttcagggagtagtgagctctgtaataatcaggaggtcatgttaaatggccttcgtagtccctctcctgtctatatttcctaatgattctaacacataattaagtgtcaataatagttatagtcaataactataagccataaggaaatttagtacatgactgattgttttttattctgattgtatgaagtaggttttgagagtgattattaatttgttatatgtaatgagttctaccctatatttacagggtgaatgcacagttttcttatttctccatcccgaaggaaatgaagtagtatttttcaattacagtgtagtagtgattattatatagaacaattacagactcatgtcttactactcttttattaaaaatgattcatttttctttcttaaaaggttgagtatatttttaaatgccgcttcacagtatatcatgttgtcatttccctttaccctccatgggcacatgtatccaattttataagtagataccacgaaaatattaatattacagaaattaatttaagagtcaaatttttagtagcacaaatgttctatgagattggatataactgcatgaattagcttggtattttcagaatctctgcattctggtctgtatgtttaaaattaggtattttcttaatctgcaaaatattatcttctagcctccactgtatgcaaagaaagtgtgctcatggttaaaaaaatattcaaataaaaaaataaattatcttgggatcctactaaaaactgcattttctttgcaaagcaagttttctcatggttaaaaaatattcaaattacaaagtaaatgctcttggaatcctactaaaaactacattttctttttgactagaaataaaactaattttatcacgtaatggtcattttgtgttgggtgcaatgtttgagtttatattttaagctttttttagagctatgttgctttctgctttcatcttgacataacttgtcaacagacttataattaaagttgtttgaggttcagtgattcattctaaataatgaatctatggagatcctagagaagataaaacctgtgcttggcaaatgtagaaactgtaattcttagtatccttttagcctaccaaaatggaaatccttcagtccctcacataggtaaagatatgtctttaacaaaaggtagcctttttaagctatgtatgtcaaagcaatttttacttaagacatcatggaaaagattttattccttcactgttcattgccaatttggaagctgaaataagaagatcctgaggcttttcccatttcctcacatgaaaggaatcagtcctcgtgtatgaggcagggagattactacaaacccttcccttacctcttggcaaattcaggaaaattgctaaaatgaatcttgacccagccagatccctgctcctttgcttgtaaccagaggcagtttcaatgcaggcctcttgtgacttccttggaaacagaccttgcatataagttggattgccagaaggataatgattaccatcccaagaggtaacgttacaatcgtcatgagaggagctctgtgagacggagaatatgataaggaatgattgtctcaccattatatgacttgtctatctcgtaatgcccatgtattgaggtgatggcctctcatgtcttggctcacaaaatgtattattccaaagatggatgaactgttgcccccggcccgctgccaaaagtatgaacaggaggtaattgagattctaaaccaagaagtgtctccagtgatgaatatgggaactcaaatatttgaacataatcactaatttaaatcaaacaagagtagtgtgttttttagcatttgaataacattcaacataaagatatatatggactaatacatactttatgttaaccttttattgtaattttaaaagctgtttcacttatttgattaaagagtcgttcattaccaagttgaaataattttatttaaaaatgtataacataaaataatcaatgtgtatgataaccaaaaatgcattctacaaactattaataagcatttaaaatgttctaggcaatggaattggtactgatgtacgttagtaacattcatattaatgtaaacattttaaacagcatgtagaattaactatcagaatgaattatactctacatttttctcctctgcccccaccccttatttcctacagtttgaccaatatattgaaggggcgctaaattgactttcgatgttgagattactttcccttgctatttcagtgaaccaaacttaagtcagataaaacaattttatttggcttcaatatggtgctattttgatctgaaggtcaatctaccaacaagcaagaacagtttctcattattttcctttgccactccaagcagtctttactgaagtctttctagcaatgtctgacctctgtttcaatacttctcacagatttcacaggctgtcaccaccactcagccatcactaacacagacaactgtaatggaaacagtaactacggtgaccacaagggaacagatcctggtaaagcatgctcaagaggaacttccaccaccacctccccaaaagaagaggcagattactgtggattctgaaattaggaaaaggtgagagcatcttaagcttttatctgcaaatgaagtggagaaaactcatttacagcagttttgttggtggtgttttcacttcagcaatatttccagaatcctcgggtacctgtaatgtcagttaatgtagtgagaaaaattatgaagtacattttaaaactttcacaagaaatcactatcgcaacagaaagtaaatgcttaatggaaatggtgttttctggggtgaaagaagaaactatagaaactataggtgataaactactgtggtagcattttaatcctaaaagtttctttctttcttttttttttttcttccttataaagggcctgcttgttgagtccctagttttgcattaaatgtcttttttttccagtaacggaaagtgcattttcatgaagaagtacacctataatagatgggatccatcctggtagtttacgagaacatgatgtctcagtctgcgcatcctaaatcaggagtaattacagaacacatttcctgttctttgatatttataaagtcttatcttgaaggtgttagaatttttaactgatctttttgtgactattcagaattatgcattttagataagttaggtattatgtaaatcagtggatatattaaaatgatggcaataaaattttatgagtgcaaagctggcataaaaattattttaaaaggtacaatttccctttcattccagttattgtaattctaagattaagaaagaacgttaaaatctgccgtatgtttttaagcagcatatgtttagaaactcatggaacacttgacattagaatttgtgtataccagggtagagaagtttgaaaagaacacacatctaaaaataccatgtcagatgttctaagaaaaaaaataaatctagagaagttattcaaatatattatttgggatgtttagtacttctctattaactaatgacttatgacctactttgataattccaaagtaaatcactgggccttttctccctggttgtgtcagcttggctaagcaaatccactagtccaggggtcaccaaactaagacctgctaaccaaatttagcatgctgccagtttggtatggctcatcagccaagaagtgtttttacgttttcaaatggttgaaaataatcaaaagaaaaataatattttatgacatgtcaaaattacataaaattcaaatttcagtgttataaataatgttttagtggaacacagccaaactcatttatttatcacttatgattactttcgcattacaacggcagagtttgaatagttgtaacacaaactgtatagtccacaaagcctaaaatatttattacctatcctatcacagaaaaagtttggcgacccttgctccagtcaaatggctctcaaactctatgaatattagcattctttttgtggcaacaactttcaggaacttccaagcactctactcacgatggtaatagaaaatctaacaaaaattgatggagtgaaaagcataatggcacaaatccgtgaagcttttgatgaatttcttttattattcctagtaagatgtacattaacttgtttgttgtcacattaaacatgtgtttatagacaacgcttagtggacatacagatttatggatactttgcaacattccaacaaccctccaacagttctccaaacagagtaatagggacacctagttgcctaacacttttaatgtcttcaggacttgcctaatacagaaattaacagagcaagctgattcatgtcaatctctgtcttcaaaagcttattattggctcctgtttggagaatggattgtgttggaaaaaaaaaaaaagtgtgttctgacttctttttgttttcaggaaagagtggctagtggtgaaataccttctctccaaaatttgtttgtatcataagttttcggcaatttttgtatgtgcctaaatgagaagtcccattgggcacatacagaaagattcttcaaataaaagctaacataaattgaggatttattatgtgctcagtagtagattcagtgctttattggcatcgcatgtatttttcccagtaacctcccaaaataggtatggctataattactttataaaattatacacagctacagtgtacctcagacaggatttgaactgaggtagctacaaaacctgggctgtatagtaaaatgtctttttcatagatatatgactaaggtaatcctattgatttacctgaagccatcccagttacacctgttgtcccagcataattatatatagcatcaactttcactctcaagtgtgtcctgatttggacggcaaaattatctgaacacgctatatacgacacttgattgataaatttagactgaacgaagatagcaaaaaggcaaacatttaggaacaaattcattaattgataattgtctacagggtggaatcttgttaaagtattgtaatgattaaagaggcatcatgcaaatataaccataagctttatattagctagtgccccgtttttgtatcatctgaagcccactaatatttcactgaatattgaggtcttgaccatctgttgaatagtgttttatttaaatgatgtcctcttccagcttctgtgacacactaccagttgtcacccacgactctttacctgacttgttttattccttctgccttattcctatgggagtatcacacagatccatctctttgcctttctgacttcttttattttgagacagtgtcttgctctgtcacccaggctggagtgcagtggcgggatctcagcttactgcaacctccgcctcctggtttcaagcaattctctgcctcaacctcccgagtagctggaattacaggcaccctccaccacatccggctaattttttttgtattttttagtagagacagggtttcaccatcttggccaggctggtcttgagctcctgacctcgtgatccacccacttcagcctcccaaagtgctgggattacaggcatgagccaccatgcccggccttttgacttctttatctggattatctcctctcattgattcgagcctggctctaagtgactgactcccaaatcatgtagctccagatgtgacactctccctcaaattaaagctttatatctctaaagctatttccgcttgtgcatccagcaactgcctcaatgttcatcaaatgcaaacatttgttccttccaattaaccatacctacttatacattgcacacatattttagttataattcattgcctgtgtgtctagagaagtagcaaatatggaaaaaatcattgcttttggaatcagaattactgaggtttgaatgctgccctttttttttttcccaacttttagtttaggttcaaggggttaacgtgtaggtttgttacatgggtaaattgcgtgttgtggctgtttggtgtacagataattttgtctctcaggtaatcagcataatatctgataggtagttttcccatcctcacctgcctcccaccttccactctcaaataggccccagtgtctattattcccttctttgtgtccatgtgtactcagtgtttatctctcacttataggtaagaacctgtggtatttgtgaaacctgcctgttttaattactagcttatgagcgcaggcaaattacttgttatctgtgcctcagattccagtattctcactttataaaacaactgtcatgaggattaaataagcatttaatacattgcctttaaggtggtaaacattcaataaatgcagtggttcgattcttatttggtggtggagaccatagagatgatgaagatggaggaagattgtggtgggtaggaggagtagaagtgatggtgggagaggtaacgatagtagagatgatgatgatggtggtggaggtagtgatggagatggtagtcatctattatcgacagggaaaaattccataataaacattatctcaaacctaagaaatgtaaaattaccttcctgttttcctcttcaaaacagaatttaccacctgacatctctagttctgtgaatttttcttctactttcttttccttatttattataattagattgtattattgggcaagtgccatcatttccgtcatttcatgttcattcgaattgccaagtccataacctgagccatatacctcactgtggagagaactgccctcctttctaattgatttactaaaatgaatatatctaaaatgatgctttttgatgtctctccagacatgcgaattcccataaatccagatacctccaaaataaaacccaagtgcttcctatggcattcagtattattctcattctccactaattttatgtctaccttcccaataatcattattccacttcagccagtaaattacattacattcgttttgttgtatgccttcatgccactcacataaaatttctcattgcccgtcaaaacaaaggaagcctattattacacttctttatgttttacttagattccattgtagcaaataccgtggatacaataagtaaccaataaatgtttgttgagagagtgaatggtatataattcaaataattgcagtaactaaaatttgacatttcaatatcatttaaaaattctacctagctcttcctggaattgttcttaataataaacgtgaccatcctgatgatctttaataattccaattttacccattagggtatccttatttacccaaaacaattaagggatttaaaattcagctttctaccacatagtttcttaactatctaaggtacatttagtcgattcctaaataattatacagtttctacatatgttgtatttattgcataaatttttctctttacactgagatttgcaaaagtgtctgatgatcttgggtcacaagataattatttctaatagcaaattattcctgcaattcagtgatattattgtacacgtaggtaattatcagagtaaggaactcagcctagggtaaaactagatctattatctagttaattggtatttatccaggagattacttcctaatcatgtagcagttattttaagggatttttaaaaaaagctttaatttatacttttgtagcaaccaggcagaatgaatggcaaattgtttttaagtgaatgccatcttaataaagataatttcccccaagtaaagcgttcataaatgaatatctttgtcctcaaggataatgtagaggcattttgaaatgcctcagttcacctggtctgttttttccctccagggtaagcagacagaatgtaagcttgctttctcggctatttcctgcatcctaactacataggaggataaattgactgatctacatacctgaattattattatatattctacttttcagtttgtttctgttttttgtttgtttgattttctttttatggctgctgtccagatgaagttaaattgtgtcacatctctggaaagaaaatagataacagataagaccgctctgcagttttgtgagactcatgcctaaaacatttttgttttagatattgattataacttcagtttctaaactaaaatctgaaagttgtatggcaaaatataccaagttatttgaaggacctaattagataattaatgtgtccgtgaactttttttttttaatgttctatatgataaattgatcctaaaatatctgggatgttaaactcagtaatgacacttttgcctattggcacagcccatagaaacaaaacattttagatgatttgcttctttttttcctaaggagactagacttatgcatgtttacaggttaattgaggtccagaaaggttaaataacttgctttcagttgcaaaataaggactggtgctgactctcctaaatccattctagtgttatagttgcaatgtcatgttactttttatgtattaaaggaaaatgaccttggtcataaattcaaatttcgctttagacactattttttgttaaaaaaaaaaaaaaaagaaatagaaatcttgcataccatcttcacatcctcaaaaagataaccatctattaaatgttcttgagattatgttgtcttatgcatcaagaataaatcaatagcagtgttttgaagaatatagtaatgtgaattctagagaatgctatgggatcagagaatacttagaacagtaatattcaaactgcagtgcatgaaacagtatcatcacctgggaccttctttgaaatgcagatttggagggcccttcccaaacctgctgaatcagaaacactgctggtgggcccaaaaatattttacaagcactctcggtgatacttatacaccataaaatttgagaaccctcgcactggcatgacaacagtggttctcatgcttcagcatgcgtcggagtcaccagagtttctaattctaataggcgtggagtggtgcccaagaattttaatttctaacaaggtcccacgtgattctgctgctactgatttagggcccacactttggaaatcagttcactggagtgtcttgtcatttacagtctgacccctgattctctttccttatgacagcccccataaaggggctttcacgtatgtccgtgtgaagagaccaccaaacaggctttgtgtgagcaacaaggctgtctatttcacctgggtgcaggcaggctgagtctgaaaagagagtcacggaagggagataggggtggggccgttttataggatttgggtgggtagtggaaaattacagtcaaaggggatttttctcttgtgggcaggggcgggggtcacaaggtgctcagtgggggaggttttgagccaggagaaggaatttcacaaggttaatcgctcggttaaggtggggcaaaaacaaatcacaatggtggaatgtcatcagttaaggcagcaaccgggcattttcacttcttttgtgattcttcagttgcttcaggccatctggacgtaaaggtgcaggtcataggggaaaggatggcttagcttgggctcagaggcctgacaggggccatctattcctgggcaggttaagggatgctactgttgcatcttgtgacaccttactgctttatgatgaaatgatctatccatatgcttgtttcatccactagaattaaagcttccctgggccaggatccatttcttgttcgttacctgtgtgatgtcttctgtgtagtagatgctcaattcaagctgtgaatagaaatgcactatattgagaactggtcctatgagatactatatctttggatgtctggctacagtagctatgtgaaaatgtattcttccagaatgcaaggcgtaaaagaatatcaacacgaaagaagacaggatcacattcccagagctgttacatataattttgttcgttttttgagtgaagaaaatggtactcatacttattcatctaaaaggagaagcatagttgagtgcaaataaaagtcagtttttaatcagaagacctgaactatctgtattcccttacggactcctgattctttcctttaccctctcatactctacatcgagcactgaaactgctctcagcaaggtcgccagagagctccttaattgccagctccaaaggtcactcttcagttcttttccctttttgacctttgtcttgtgcttgacagaaatgattagtcccttcttgaaatttttctctcctgcagtttctgggacattgttctctcctgttttctttcagagtatatcttccctgtcttctattcctgccctttaatgtcagtctacataagactcaaattgtgattttattttcttcttatgatgctttattttttggggaaatatcatttataatctttatcatcacctatatttttgattcacaaattgatatttctacctctccctctctcctgatgttcatccctgtataattcaaatgcttataggctatgtattcctggatttctgactggaatctaaaatatagttttggagtttagatcgtataactctagagagggtcattcacatcatagtctctaagaatggtacatcctgaacttgtgcagtgagcaacctgtgcagccattcacagtggtcttgatatctgccacatcactaaatccctccaaatgtacctgttaaattctctttagtttgttatttttttctacatccttgctgccttcactctagttaaaactgaaatttttctgtatgaaatttttaactgatttctctgcctctgatctcacctctcttatccatgctttttacagcctcccgagggatatcttaaaatgcagttttaattagattattcccctgcccataaatcttgaaatgcatggcgtagaaattcttttgtgatctttagctgcctacctctccagcttcactcccttctcctctgctccttttttaaaaaaaataccagtgctactccaaataatctgcaaactttttagtaccagtccacaattgagataagaagcttgagccagaatataaatcaatgtactccttcctttgtcaagaaagttcggcaattaaaagcaaaataagatcaaatcgtttgttcagtgactcagttgatttatactctggtgaaaactcttttcttcttacagactaatagcaaacagttcactgtctgctaaagtctgaactttgttccgcactgccctatgctttagcttaaattaaccactctttgatctccaaatgctctgtgctttcttaagcttctgtttctttgtacctactgttttctctgcctaagattctctttagatacctttctttttcccattcccatgttacctgccaccgtgctactaaccaccttgtctttctggttatctaaccttgcagaggcagttctcagccatttgtgtgttttttttttttttttttttttttggagacggagtctcactctgttgccagtctggagtgcagtggcgcgatctcagcttactgcatcctctgccccgtgggttcaagcgattgtcctgcctcagcctcccaagtagctggcactacaggcaagggccaccatgcccagctaatttttgtatttttagtagagatggggtttcaccgtgttggctaggatgggcttgatctgttgacctcatgatccgactgctaaggcctcccaaagtactgggattagaggcatgagccacagtgccaggccacttctcagcctttttaacacttctattaaaacacttgccaaattgtatggtaatgactttatttttgcatgcctgtatctccagtaaacgccttgagggaagaaatcatttcttgtcatctgtacacctataatgcataaagcagaagtcagctcatagtaggtattgaataaatatttattggatgttgatgagggattttccaggttttgtgcgagtcttgtcagaaaaacaaaatcactgtgatttaaagagaggaaacgtaatataaggaattggctaagcaggtagtagaaaactgagacgcagcgcaggggatggagaggcaactcaaagcactagtaacgtaaggaagctgctaatatccctagagctggagaaacaatacagaaaaagtgatattaccagagctcagaagctggggctttctaacagagattaaactaaagttaggactgccaggcagaaaattggattgttgaagagggagctagctatccagagaaaacagaagccacagcagagatacatctgctctagaaatgccacccaaggtagttggagaagaaaaaagaccttggcttttctcttcctcccaccttccaatattctgccattgcctccaaatgaacaattaggagggcaagtggtgttgggaaatgtatatccctctaatacagaaagtacagaagaaatgtggggaatagatctgagagcagatgggcatattactgcacagatgggttctggccgtgcatcttctgctcataaactatgtgacttaagccacttaatctccccaagaatctatttcgtcacccctgaaatggaatgtatatggccttccctgtttgccctcacactgtggaaattatattacatgtgtttgtcttgaagaacgtttacatttaaaaaacaatgtctcctttccccaggagaaagttgagtttccaattattaattcagggatggtatcttcccatgaccacatttatatattattcttattctgacatcttctgagagtattcttagtaaagtcttccctggtcagaaacctgtctctttacaaatgaacacatattatgctaccacagagatataaaaatgatgccaggctgggatggcctgaattgtgtcctccctaaattcttatattgaagctctaatctccaatgtgatggaatttggaaatggagactttggaagataatttgatttagatgaggtcatgaagatagggctcttctgaggagattagggcccttataagaagacacaacaaagagcttgctggctctttctccctgccttgggaggacacagcaagaaggaggttgtcttaggctgttcttgcactgttataaagaaatacctgcaactgagtgacttacatgaaaattgatttaactggctcacggttctgcaagctgtagaggaagcatggtggcgtctgcttctggggaggtctcaggaagctttcaatcatgatggaaggcaaaggggaaacagtcacatcacatggaagaatgggacaaggagagtgagacagtgcagggggaggtggcacacatttgtaagtgagttctctcaggagaactcactatcgcaaagacagcactaagccgtgagggatccgctcccatgatccaaacacctgccaccaggccccatttccagcactggagtttacaattcagcataagatttgggaagggacgaatatccaaactataccagaggctgtctacaagccaggaagaaggctgtcaccaggaactgatcctgctggtaccttaattttggaattgtagcctatagaactgcgagaaataagtggctgttggttaagccacccagtctatggtattttgttatgtaagtgctagctgactaaaaaccggctttgttaagcaatgagtattacttctgttttgactaaagttcatagtgatgcttactaacacagtagatggattgaaacaggtcatgatgctggcagtggggcattaagtacacgtcagattgaaatggctttccacattgcactagatccttttggaacccgggttggaagttatttaaacttgaaagacccacaagcatgttgacttctcttaaactcaaggacctttcacactgagagagtttaaagtttaaattgcctcccacagggtccaagtcatcatccaatgcatggtgggtttctttgaacacttctgtagtcattatgagtccacatcatttcaagaaagaagagacagcaacattagttttcatgctaattttcctattcactcaactaatatctaatggattgctatggtatgtaaaacactccagttactttaactgtaaatctaagctttccctcaggaagcttgcacccagcataaactgtcatgaagaagtactaataaaatgttagaaaagttttaaggaagaaaagttcacttcctgcttgagaggcatggaagacttatgggaaaattagcatctgactggataattaaagagtagggaagcattgggctcaagatgaggaaagtgacaattcattgcaggggaaagcctgtatgcgaacaaaacttacatgggattaagtattcttgtttgcctccagcagaagtatgaagtaaaggaagtttagaagtaaggaatgaggttgaaaaggtaggttgagttcataataactaaaggtattcaataaaagattaaggcatgtagacttaaaccttctggtcatggggagccattgcatatttttgagagagagaaatatgatatggctactgtgaaccatatcattttgatctcacttgagagttgggagagagaggccatcttaccttggtttcatagactgggaagggggaaagaaaagttttctctaaagggccagagagtaaatattttaggttttgtgtatcataaaatttattttaaaactactcaactctgctgctatagctagaaagcagccataaacaatgtataaatgaatgagcatgactgagttccagtaaaattttatttaccaaattagatggcagaccatatttgtcccatagaacatactttggggattccggcactaatgggtaaaatgagactattttgctgttgatttttgtttatatgtttcattgtctttgttatagctgtgtttgcagtttttattcttgttattccaattgtggcttttactttatcagtcattaagaagacactaaaacaaatatgactactctcacacgtgagaaagtgagaaatggcatagggcttaaagccagttaaaaaaggatcatggaagatattaataacaatagctaatatgtatatggcttctaccaagtatttgctacatattaatgtatttcacacttaaaatagcattacgaagtaagttttattattgtcactctttgccaatgataacaatgtgtcatagaaatttcaagtgacttgctcatggtcacatagtttacaggaagcatcgcagctaggatttgaacccagacagcctagcttagggtgttgccttcggaaattcctcgccttgctatgttgtaataagttaaaggtgatttcatcaaattatttagctgaaataaaatgcttgactgggactccttaagaatttgccaaagtctatggaagctgcacttattctagattatgtctgttctacattctgaagtatcattgactctagtgtcccatggcaacacttgattatctttaaatacagagacctttttcactgaaaagatttctttaaaatttagatgtctttttcagcatcaaaaataagtggaatttccatataattgaacttttttttccaagtgcaagacttttggagctcaccatggtcttaaccacattatataataagtagtaacttttttcatctatgcttaatattttctctgatgtgagaaattgtatcatcagattagaaagttgaggattttaggaaattaagggaaattccaaggtaataataaattgggaaataaattattttatattgccattagggtacaaagtatacaactaaggatcatattttaatgaaaaatttcagaattaatatcctgatattagagacttcaatcaaattctcatataatccaagatagcgtagtcaaaaccactaaattactgtactgtgtagcaatgaacagtaattctatattgacttatccttattttttttttaagatgggtttctcgtttatttggaacaaaagaaaaatgtagtgttgtagaaatctttggattcagacagacctgttcttgagtcttgactcagtgcttcactgtgtattgaaactaaatgaagatcttcaacttttctattcatgatcaatctgcaaaaataaaagctattacagataacatacaaggtttcttgagcgattaagttttctttttgaaagcctgtgacctgattaagatgcttaaaatgatatatatgtctcttttctgttctttaaatttgaatgaaagtttggcattttaaaaaactttaggtgatttaggagtataattttaagcagatttttagagtacgagtgtccacatatttaactaaacattcaaaaattagttaaaatcaatgaacttgggaaggaaaactacttgctacataatccagaaaattttactaaattatttgaactaagcatgactctccaaactgtggacatattttctcaagggattctatgtattatggcttcaaggtacttttgtgtgtacctcaaaatggctgaaggcattttaacagtgcatctgagagtgtcttacttacatattatttgtacactattttatctatatctttggacattttatatttctgtgtaagtaaaacttccatgaaaatttcatttgtcaccatattttcgttatgcagataagaaaacgaaagaagccaaattgaagacaagctctgaaagggaatgtgcgccctctagtgacccacatttatttatcataaggacataggcagcttttgggtttcatcattttaaataaactttacatttgattttaaaatatatgactcaggattttcaacttgagtatattatattgtatgatcatagatttattactctgacaggatttcatctatcatttaagagaatatttctattaacctgtgttaaggtgattttcttgcacagaagtgtgtttcaaagggactttcaatttattgaaaatgaaaaataggctttaggcatctgtggcttagcagcattttatttcccatcctctgggtcatgcagtttttgcccacgtgttttcacactccttggctttataactaattcctctaatgtagcagtatctgacattttagaatttgtgggggtttcttaccttttaatttttaaggttgtttctctcaaagatatttaaacaaaacttataaatgtgacatctgttcaatcatgtcacactttagaaataaatattaccaatgaattttgaaatgattaagatttaataccaaattaaggtaggaagattattttaacatcatttctacctaccagacgtcaaaatattttaggtaagttttactttgtgcagagaagcaatattttacagcagttttattctcttcactgcaatcaacgattctatgggtgccaagatgaatatcaataccaaataactcagacatttttggcattaatagcttaaaacattaaatcattcaatttgtatgcaagggcatgtattttaaaaagcagaatttttaaacatactaagtatataattcggtatgccataattgataataaagaagatgtacaattttaaggacaatattttgtgcttggactagaattcagcttttgaggcacatgttaaataggcatattttaggacaaggtaaacgccacagaaattgattttttagtatcttttaaagatgcctttcagtgcaatctgaaatcattaaattttactgtactgaaacatattattttatgagtgatgtgcttaaaattacacatataaaactagaaatacatttgagaccatgcaaatataaggaaaaatagatttttgataggaatgttaatatagcagtttccactaactgaagacagagtcctctgtcatctgtcacattgttccaggtgctgtgtaaaccactgaagagtttataggctttttattataactgggaattataacatctttagattttatttaatttgattgctagatgaatagactaatgtaattggaatatgaaagccacaatataagcaaagctgatctcagtttttgtatcttgggtcaaaacctctttaattagagaggtaagtaaacatatttacaagtaatttttaaaaagcatttgtattgtagacccagaaaatctgagacaggtctcagttaatttagaaagttgattttgcctaatcctaggtactcgggaggctgaggcacgagaattgcttgtccccaggaggcgggggttgcagtgagattgtgccactgcactccagcctgggtgatagaatgagactttgtctcaaaaaaaaaaaaaaaaaaaaaaaaaaaaaaaaaaaaagttgatttttgccaaggtggaattcgcgcgcctgtgacacagcctcaggaagtcctgacgacatgtgcccaaggtggttggggtgcagcttggttttacacattttagggaggcatgagacatcaatcaagtacatttaagaaatacattggtttgacctggcgcggtggctcacacctgtaatcccagcactttgggaggctgagtcgggcggatcacaaggtcaggagatcgagaccatcctggctgaaacagtgaaaccccgtctctatgaaaaatagggaaaaaaaattagccagacgtggcggcaggcgcctgtagtcccagctactcgggaggctgaggcaggagaatggtgtgaacctgggaggcggaggttgcagtgagccaagattgtgtcactgcactccagcttgggcaacagagcgagactccgtctgaaaaaaataaaattaaaaaaaaaaaaaaaaaaaagaaatacattggtttggtccagaaaggcaggacaactgggtgggggtgggggcttccaggctgtaggtaaatttaaacattttctggttgacaattggttgagtttgtctaaagacctgggatcaatagaaaggaatgtttgggttgagataagacattgtggataccaaagttttatcatgtagatgaagcttttagctagcaggcttcagagagaagaggctgtagagtgcttcttatcagacttaaagtctgtgttgatgtaagtgtcagagaggtataatgaggcatgtctgacccccacttcccttcttggcctgaaccagtctttcaggttaaattttaagagccctggctgaggaggaagtccctttggagggggagttagccttttatttttggtttacagtatgtttttacttcaggaccagtttgataacagcttttaaatttttacaatttaaagcaagaagtcgctgaagatcgaagaaattaatttacccaagaaaataccagaaagataaaaattagggattaaaacctgtggtgcctgatttacacacacatatatagctatgttatttttttttcttttttgagactgagtctcgttctgttgcccaggctggaatgtagtggcacaatcttggctcactgcaacttctgcctccctggttcaagcaattctcctgcctcagcctcccgagtagctgggattacaggtgcccaccaccacagctggctaatttttgtatttttagtagagacggggtttcgtcatggtggccaggttggtcctgaactcctgacctcaagtgaactgcccgcctcggcctctcaaagtgctggaattacaggcatgagccgccacgcctggccctcagctcagtatatttttaaatgcacatttactttacatttaaagcaacttaaacatacacacaaacacacacgtatcacacatattacaaaatacaagacaatcatgtggccctatcttccccccttccacagagggagacacacttacactatacaaacgtgtatgtgttgtgtgtgtgtatacaaactatcttgatttggagagggaactatttatctaaatattagcttgttttcttttggttaaataggatttcccctttaataatattctgtaattccaaaaatataataattgccatgtagtcaatgcatctcaaagtcctaaaaatatttttagaactaataggatttatactgaatttcatttgatatttttataagatctatttgatgcaaattgaatttgtattctattactcgatttttttttaaagcaaatgccatgtggaaacaagcagagagggacaagttttcccagaaggaaagttgaaaggggaagagtagagagaggttgatcaagaaaaccttcacagatgatgtgcatcttgaactgagccttggaagatgaatagtaggtcatcttcaaatggttggggatttagggtcaggaaagtgcctgtatagtaatatggaattaaaatgtcttctcacttcggaaaactctgaagaagaaaggtgatttttaaaaatacagcaaagttggaaaatcttacctccaaaattatttcttctttaataccaacaaagaataattatagttttgttcctattaatgttaaaacttgcttcctagctaattaaaatgttcattaagaattggtttcataaattatctggtctaggcctagagccctgggaccctgcaatggttaacgtatttcacaggcatcagcattttcctttcaggtttctaaggatgaggcttataagtttttatgaaattctacatgctaagatgtttaaatatgtaaaatggccattcataaacctagttcactaatcaaattagttaagtctgggagcttggaggacttccactctcaaagtttacacatttgggaatgatgagttgcaacttgtatattgaaagtgactgaattaaaatttatgtaaatgtgtcatcttagtttaataggttatgtggcagtcactgtaaagaaaattaacagaacacagtgcccatcaggaggctcttctgacataattagcacagttatatagcactaattcatgtaatgttttactattgacaattcaaaattgacaacttcttaaatggcaaacatttctctagttctttgagatgtttgtatgtgtttttgcctttgaatttattttaaacatttatatacacaggtatctctcagtatttaccatatgggatgtaattaacctaatttacatcatttttatgggaaattcaactggatgaggctgagtctgtttgtacaatataatactgagaaaaattgtcactctctgaatatttggtatatatgccccaggcttttgatattttgaaacttccaaaaaatggaaggtctttttgaaaaattgtcttggtgtagtaatacacttttgccaagaaaaaaaaaaatcaaagacttacttgccctgtatgatgggactttacaagttttaatttcaggggtttctgatgagtatatttgtaaaggagaaaaaaattgtcgcttcactgctaaccataaataataacaaattgaggttttaagatatacttgaagaatagaggacagaatattcatcaataattatagaaataatcattttgtgaacagagaatgagaagttatttttttattagctaaaggagattttaagctaggtaaagttagactgcatttaagggatagagtctgataacattcggaagtacgttaagtacagagttaagtatatgaggaaagtaagttaagcactaaggaatatattagtggactgattccaaaggtgtagggacacattatgagcaacttatgatacataagttcattagcaatggttttatgtgagttgttaaagtggggaaaaaagaattattagaaacgagtaattttatgaagaagcaaaaatacatgtacagaatccaacgttgaatatggcattgaaaataagtcttcagtgttttccttgagggttttaaagaaggtaactgagttgcatctgaatgatatatttcgttcgtaattaaatacccaggctcacttagtgcaaagtatgatagaaaatgccatctgcaaagcactgggaagagtagatagcacccaatttaaagcatgaagacatttaaatcagaggtgtctgttcatttgccatgcatctcagcaaagatatctgaggaatatctagtagcagtgaaatacatgaaaactacacgacaaaccacaaaaagtgatgaagcgatagttgctaaattgataaggaataaaataaacgtgcaattgcttcttggaagccagggtctgagtaggatccgggaaggagactgagttcattgtgcattgaaaatgtcactgaacctaaaactaagcgttggatgtaggccattggcactcagggagagtacatgggaggccttgaaaccctgcctctgcttcctcttcacccttccatcctcattgctggcataaagagatgaggctatccactggcagaatattggagagaaaacaatgctagtagctgacagttaactcccagaactctaagagatggtggtacatgttaagtattagagtgtaggctgactgcacattatgtgtggacaaaaagagttttagcaaggaaatcagagatgtttgaaggaagaagtccaaatggaagcaacataaaataaatattaagattaggttaggaatagctcagagcttgaattgtgtaagaattgggttcagtgtccacctgtttcccatgaaatcaagatatcacaataatgatagaaatgaaagggaagaactccaacaggtgagaagagtccaaactcattaatatgtttctttgttccattttagaaaagaagtataacattaacctctgtgcttatgaataggttattttccttagacaaaacgctctcctcaccactgccctagtaaaatttgaaattgcctttttaaaaatctgtacatcaaaaaacgagcgtaatcactctccatacgatctttgtataaaagggaagttcacgcactgtatgtgacccctttccaaatttataaagtcagacaaaaaattgaatgaggaaagacctttctgtagaatttcacatcctgttgtttgaattgatttgaattatcagaactacgtgccaactggtgtccaggcctcccttaaaatcttcacagacagagaagcaaacagacagttaccatggtgttgactccacaaagccttctttgtgtggagataaccaatatacttggcagagcctctaggctagaagctgatttaatcctaatttacagagaaggtgttttttgattatcctcttaaaaagaccagtgtgagctgagccccagttctgtgtctaaaccatttttatcttgtcaaacaaatgcttcactaaaccaaattacttgataatgtggactaatgcattctcgtctctgttctttatggagttaatagcatgtctggcacatagtaagcacttagtatatgctttatgaaggggaaaaaaaggagacatttgaccgttttaaaaggaaacatacaattttgcctttttcaggaaaatacacctctaaaagtgttacaagatttcttctggggccgggcgcggtggctcacgcctgtaatcccagcactttgggaggccgaggcgggcggatctagaggtcaggagatcgagaccatcctggctaacacggtgaaaccacatctctactaaaaatacaaaaaaaattagccgggcgtggtggcgggcgcctgtggtcccagctactcgggaggctgaggcaggagaatggcgtgaacctgggaggcggagcttgcagtgagccgagatcgcgccactgcactccaggctgggtgacagagcaagactccgtctcaaaaaaaaaaaaaaaaaagatttcttttggaatgaaaattatttactttcaaactaaaaacaaacaactttgtttcttttttctgcagtgaattggaggtggtggtataacagttacatcaacatgcatgttataggagcagaaaggctgtgatccctttccttcctccttatacaggtcatagcagacattcctataacaaaagataggttaacaagagaaaagcatgagatatttatctaataaaagttttaggtgacatgggagccttcaaaaatgaagacccaatgacccaaaggaaaactgtttttatgcttagagttgataaagagtagacagccatgtaggaatgtgattggacaaaaagggaatgatctgatagtaatagactagggacaaccagccaggcctgtctgtgtagaattccttcctcctacacatggggtaggaccccacttgaatgagggtcttatgatctactatcaaacaaaagtatgtcagagaattttttatggctagctaatagagagaaaggtgggcaaaatacagagttataattctggcttttatggttggctttggaggagagggtttttggtttctatgacctaccttgaagaagaagaattctggttactatgactcacttcagggaagaatgtggagttaaagacaggaggggaggagaaggtcagagggaccttggttttgaggctgcttttgaggccttccagtgttctttagttcaaagtttcagcatgccaaagtgccatactttggggtatcgttttctgagcccctacagtgtgcaaacaagagcaatgtcaattcaacgcctagtagaaatctttctccaacataggcttcagcagatttctttcagctgtcatgccagcctagtaccttgaggcacgtttgagtttcagggacctctaagtagaagtgagcaatctttcttagagatagtctaaatcaaatgagggtgagactagagagattaagtttaaagcgtgaatttgaaagtgactggtggatattcctatctcatatttatgagtcagagggtatttgatgtataattgagtcagacaaataaatttcaccaaagtggcccaaatgcattatattaacaacccagttttcaaaatatttatggaagagtcagtgaaggattttattccattggaggaggaacaagaataaagaatagctctgaattactttagaaaatatgaagcgaaatttgtttctacaagtacttgaataaaagacaaagtagaatatacagttaagaggtctatgaaggccagattataaaggatcatgttgaaattttgttctttattctaagaaaaatgagaaagtctttgagtggttttacgaatgaaggtaacataatcagatatgtttttactaccgtatatttcaaagtagctagaagagaataatttgaatgtatctagcatagacaaatatttaagattatggatatcccaagtacactgatgcgatctttacaaattatacggatatgttaaattatcacatgtacccccaatctaagtacatctattatgcgtcaattaaaaaagatagaaatgataatttttccagtagtacataaaagagagagttccataaatactgcccagaggccaagtgaaaagctattgcggtatttttggtcacatttaatggcaacacagatttgggttctggctatggagacaggaagaagcatacatattcaggagacagagaatgtatgtgtgacagattagactttgcaatacattaaacatgggaaggaagagagagggttttagttggtttgctgtaacaaaataccataaactgggtagcttataaaccacagaaatttatgtctcccatttctggagtttgggaagtttaatatcaagtaactagcagatttagtgtcttttaagggcaggcttcctggttcatacttggtgctctctcactgtgccctcacacggtggaaaagaacactgatctcttcagatcattttaaggggactcatttcatgagggctctaccctcttgacctaattacctcccaaatgccccatcttttaatatcatcacattgggaattaggcttcaacatacgaacttttgtggggcacaaaattcagtccatagcggagatgaagataacaaatatgagggatggtgatgctaattactgatctggggaatactgatagagtactagtttgagggagaagatcaaactttaaaccttggcatataatgtttaaggagattttgcagcatgcaagtggagacatccaataggcagatggttatatagctgtggaattcagaacaagtgcctgaattagagatatacatatcagaatcattgataaatagattgcaattcaaggcatgatgactgatgtgttttctggtgagagatagtagagtagaagatgattggtaatgaactaggtcttgacatctagtacataatgatagggtggaggaggatggacctgcaaagaaaaaattaccaatggtcatagaaatagaaggcaaattagaatagagtggcatcatgaagccaaaggaagaaaaattacaaacggatagtatggtcaacagtgttaactgtagtcctagctacttgggaggctgaggcaggggaattccttgaacccgggaggcagaggttgtggtgagaccagattgcaccactgcactccagcctggtgacagagtgagactccgtctcaaaataaacaaatactagaaattggatggactcagatgcttgagcaaaagtaagagaataaagttcaaaatgtaggtagtgggaatgactttaattaaaagaagggaaactcaaatgtaaaagaagggaatgagaacggtggctacatatgcgggtctgatggtgtttggaaataggaagtgaaagaagttctactctgataattgcacttgtttctgtaaggtagggaacaagatcatctgagagagctgcagaaagaggatgggccagagctttgataaaaggttttaatagttcctgtagagacttagagcccaacttgggaaaaaaaaaaaaaaaaaaaagtatggcaggatgctaggttcatttgaggctgttgattattgccttagtttgggttgccccaagagtagatctgaagagaaggatttaggtgcaagcagtttatttggaaagtgatcccaggaaacaaagtagggaagtgaaataagaaaaataaagcagccaataaagtatggcacaaatatagggatcaggttactgctggaaggaactggggctcaatcatgcagggaaccccttgagacactgtgtatcatacttcaggattgtccaactgaggggcaagggagctgggaaattcaccaattccaagctctcactggttaagggacacccctaaagtattaacattccagcactccttctctgtccaatatactggcaaatagatgcttgcagatagagagacacaggaaattttatgttgggccaaagcaaaaataaaaatgttttaagacattatgatgataaatatgcataaaagatgattgaaatataattcactggtttgggtaggtaatcaaataaccatagtaggagagtatttaaggagttaacatcgctgaagagagtgtgaaagatttttacagcatataattgtactgtatattttaatcaacattatgaatgaagaaacaggaacctgatagtcaaacttgtggataaaaaatgtaggaaagataaaaatcatatatgacacaataaaaatccataaacatttgtaatgcatacacagataacttactgacattcagtgacatgggatttagaggaatcaggatccctagtctcttaatttcaagttggatagcctcgataaataacaactcaatctgtatgctatgaaccgtcaagtttctgacccatggtattgaggtcaattaacttaatttctctgaagctccatctcatcctatgggcagctggaattggtgatacctaaccaaagaattttgtgagaatataaaatgcgaatatgtttttctaagggctttgtgttccattaatttctgtatctgtttaatttttaaacaatagcctgcaacaaatgtgagaaattctaactggtttatatgattcaaagtcccaaaactggagttcaatagatcaggtcatatgtttgtgatagtaattaggttgtgatataactggtttaatgatagtttatgtgaaaaaattcctagaagttttaagtcaattgaattgcaatgtgagttgaaagtctaatattgaagtgaaaatatttattgaaatcatgggctatatcaatgaaagtattataaaccagaaagataattattcttccctgtttattttacacactgctgatatgttccctttaagtacccaatttaaggaaactaagataacaacaagccatagaatatccgttgaagtaattaagcatagggtaggctgatgatcaggtatctactgataaatttaaagagcggatttcaaatatttataattttgtatccttttgccaatatctttccaactactctccacccccaccagctcctggaaatgaacattgtcttctgtttcttttagtttgatttttttttttttttttttttagattccacttgtaagtgagatcatgtggtatttgtctttctacacctggcttatttcacttaacataatttcctccgggttcatacatgttgttgcaaatgaaaggctattcatagtcttaaaggcttaatactattccattagacacttgggttgattccatattttggctcttctatacctaaatcaccagattagaatgaataatttatccctggtggctccaaagatctcttccaaaaaaaaaaaaaaaaaaaaaaaaaaaggtttgaaaataacaggataggtgatctgatatttatggcagcataacaactcacaccaaaatgtagtggcttaaaacagcacctatttattatttctcctaattcttcaacgtaggcagtgccctttgggtatttcttttctctatgtggcatcaactggagcactcatttgtctgtcttcagctggcattgagatgggtcacagagggctttatttgcatgcctggtgccccatgcttcttcatgtggcctcttcacatggacagatcaagtttccttaaaacatgatcacctcaaggtcattgtacttcttatataattgttgtcttctcagaatgtgtgctctaaaaagtcaagctctgacatgcaagcacttctcaaaaccttacttgcagtactcttactattgtcccatttgtgatagaaagtcacgtggccaaacccagaggcagtatgattggagactacagaaaagcatgtgtttcaatggtgaccaccaacaggaattttttttttctcataaatactttccaaaaagaaaaggttatcgtgggaagtagtactttttcaaatagtggaaacattcaagcagaggctgggtaatagcttacaggatatattgtagaagtgatttttacattgaggtgaataaaatgacctctgtgatcataagactctagatcaaagctgactccaaatttgagtctacctaacagggaaaatagtgctgctattaatactaatagaggtgtcaggcaggagtctcagattgagaaaagaatgataaatgtggataaattgctttttttaatatagaagaaagagataatcaagaaataatgacttttattttttgctgtcttaggttggatgttgatataactgaacttcacagctggattactcgctcagaagctgtgttgcagagtcctgaatttgcaatctttcggaaggaaggcaacttctcagacttaaaagaaaaagtcaatgtaggttatgcattaatttttatatctgtactcattttgtgctgcttgtaaactccgtgctttgttatctgtgattctactagttgatagattaatgcgatatgataaaatgctgtttaatatgtcttaaaaatatattttagatagcaagcaaaatcaaagtttagcctagagaaatctttctggattcttctgtgactgactagggatgcctttcataaacttgccttaacttacatattatttaactataaattaacaattttatgacattaattcatgttgattcctttcatatattgttcagttacctcaaggctaggccttagcaagcttgcacaattgtgtagagtagaatagagtaaaatagaatagaataatataatagataccatacttaggactatgtctatattctcactgttatcaaaaagttattctttatagtcatcaatccctgtcatatattataagatatttaaatttcccagatatttgtgtattaccttatctaaaaggtgtccagcctttctcagtatttacatgtggtagcagatgctttgttgttgttattcccttctgagatggtataattttgaccttcacaaataggaagttttattaatttaatataaagtgtttcatctttagggaaattgtcaaggctttaatttttcaacttcaacaattataaaacatgcatctttgtatatgattggcaacagtttgtaaaataatttctaacaggcagagtaaataaaatgggcaagctaaggaagcagtgattatgaatgaaaagtaattttatccatgggaagatcacatctaaatgtgtatattagctctgctttttctctccaggattcaaatcatgaagttcaaaatccattgtatttttacaaatacgacattacctcagttacaagctaatgtttgctgttggggttggaacttttggagatcaacaaaagatatatatatattctggaaaaaaaatctattttttaggctgcttgaaaaagggaagacaattttgtcaccagttcttcttagagttaactacttataaattggaaagctattttaaattacttattagctttataagacatgctgttgtcagcattataatagactattctaaattgtttcaagaaatgggaaatatgaaaactgaaagataatatataattgtagaaaattagctaaatgtcttttttcaagtatacttctttgaaggtaaattgtttgctgtgatttttgagggaaattctcttagtagtagaaaattaattagagaacattaaactctaattttcaaacatcatgttacatatttgaccactgaaagtatgaatcacctttagcattttattagctaattaaaaatgattattgatctgattctcacaggtttctgtctgatactctgtttctttatcttaagacagctttgatcaggcaggaaaattgagtttcagtatttcaggaatataaattttaaaagttcctgttatcatgtggttacctatgaacgatttgcattttatcaatagcgggagcatgacagactaaaagtgctcaaaaatgtacagtgttttataactggttttctgataccttgtgagtcccctttatcaacctgaactctcattttctgaaataacaacatcattcttaattgcctactaaaatgggacatgaaatgatttaccttgatgtttccctcaggctaaatacaatgtatatgtattaaaaatccttgagagaaatacataattacgatgatggatattcagtttaggtatccattaattttcttactacatcacctgtcggtttatataggttattttaaactcatggcaggctcgtgtcatgaacttgagtggtattaatccatttttaggctttcattaaaaatggctaaatattaccaactcttttttttttcacttgatttcttcatttactcctttcaaatgcttttagccagttagcatatcataggccattatcagttcaatttcacatattttaaaaaatgcaacttttaaacctaagcataattttttccttgtatattcaccatgtgttttattcatataattaacaaaatgcacttatttaaaagctgacttctgggggacctttctaatcaaaatgtccctggaccaccaatattgacattatctgggagcttgtcagaaatatagaatctcagaactagtaaatcaaaatttgcctttgaacattttccaggagtgattcctatgcacataaaggctcgagaatcaatattctaggacacaatcttgggctttacgtagcagttacctctcacattcttttagtatcactgcagttcagactttttagctgaattaacagattctaacaactcgaattttttccgtgagcacatggtaacgcaaattggtaatgaaacaaacaaaaaaaatagcctcctttgatcacaaggggatttgataaggtgtctgaaaatctggagcttctgtgaggttctcttgaaaccctccctatcaagtcgttatggtcatctggctttgggctcttcctcggatctgcacttgattaccctctttcagaatcaactttttaccaactcccgctggaaatcatcaagccagttaatgcttccaatttctcctatctctgttatctgtgtttactacccagagtataggtacctcgagtctatattttcttctatctttctctctctgctctattgcactttcttttccttgcttcacttcctctgctttcccacactctcactcggcaggctcaaacactttttcaagacaagccttctatatacttattctactcatacgtggaaaccaattttaccctcgaaaacagcactatgactcatccctcttttgtacccccactactttagaatgactgactccctcacctaacagagacaattccaaagatactgctctcttcatgtaaaaatacctctttccttgcagttaatgacttctggccatctcttatctaccattttatcatattttctcattgaagactttggcactaggttagtagattttttcaaccaatttgttctttcattcttagttatttcagcatccctgtgggctctcctgctatcactaaaagctgttgtttctctcatctcctcaattcagctacctgctgtcatgattgtatgtatgtagatgttgtcattgtcaggcattactccatttctttaataagattatttttttgagacggagtctcgctctgtcccaggcgggagtgcagtggcgcgatctcggctcactgcaagctctgcctcccgggttcacgccgttctcctgcctcagcctcctgagtagctgggactacaggcgcccgccaccacacccggctaagtttttgtatttttagtagagacggggtttcaccgtgttagccaggatggtctcgatctcctgacctcgtgatccgcccgcctcggcctcccaaagtgctgggattacaggcgtgagccaccgcgcccggcactaacaacatattttaacaaaaccagcagttcttcataagctttccgtgcatcctaagtatattttcaacttagtttctctcaacaattatttcaagcttttgtggggtacctaaactttccccatcattcacagtaaatgatttcatctcctactttagtcgaaataatatttctcaaattgtgggtatttgtgctcatagtatcttttttttttttttttttccacctgccttagtggaagaggctatccttcacctggttgaggctcatctctgggtgtgtgttctcagcagcatcactgactatgtattaagccacctggttccattcagctgtatatccagattgtcaaaaatctacatcccaggtctttatcattagcttttaaaccggttgtgttttcatcttttagaacgtgtcctctcctataaacatgcatgtgaatacttaacgtgccttatcttactcaatccctctgtagaactagaacctattaacctcttttccctcatgaaattctttcctcgcttggcttatgggatactgctttctcctgattaattctttcacattcttggccatttgttccaattcagtttttctttaatattgatattcttcagagtccttgtgtttcttctctggatatcctcattcattcccattcaaatagtgtctattttcaaatgaacccttctcccatatgtatctttagctcatctctttcttaaaacccagggtgatatatctgactgcctaatagacaattttaattgatgtttgcctgatatcttaaatctcattatttccccagacctcctttattctttctccttcctttcaccctgcaaacagcctaatccagaaacctgaaagtgaactgggtcacctagatttttcttctaccattcacaagtccaatctttgacaggttcaattaatcctgctcccttaacagctcttgaaaatgtccagttctctctattcccatcaccaaaaccctgattaaagctaatatcatggcttacttctatttaagatgacaatcctgtagctggtcttccctgctactaatgttatattcctttagaagtttccacatcacctctgccaaagcgaacatattaaaacctcagtatgatcttgttatgtctgtgtttataatcatttgagaaagataaaatcagctactgatagccaggagctggcttggcacttcagttaggctttggaactgctagatgttgccttggtacttgcagccagtctgatgttctctggttgaatataaataattgctagggatgccagcatcatacagggacacgctatggttgtgatgaatcaagataaaagcaagaccactttgtaatcatatcttaatacagtaaaaaagaatagcattgtccaaaccacgcctaatgaccaaatatccctcatcttcattaatgtgacacattatgcttctttactaaacacagctttagcctctctgcattcctcctgccatctagataaaaattttaggacactcaacatagaattaccctacttccttacaacatccaatcaaaacaaagccccacttccttgatgccccctatcatgtaacacaagcccacatcttaaaataagctttttctaacatactcttagagacagccccatagttccctgtgatgcgctgtctctctcgttgcagcgtgtaaatcaggttaactttgataacctacaaatatgttccagtggtctttgtctgaagagtgttgacaaagtccatgtcttcatattgccctcttaaagcctacaatgatctaatttttgtttacttgcacaaactaatttctagccattttcatttcaattccattgttggtttctagaaatcaggacttgaacgtgaagtggctttggttttatgtgtgtgtgttttgtttttggtgtccccatgcctaacacacaaaccaataaatgtttaactatatggatatgtgatttttttcagttctgcagttgcatttaagataggatctattaccaatatgaaggatagaacaacttctgaataaacatttgagtgaataagttactcttcagtcaaagggtaaaacttcattatagaatgttaaatgagtagattcttaattacttctaatgtcggagtaggactgatagagatccataacttattttcataatgttagagaagatacagaaagaggaggcttttaagaggtgctaataaagaaggaggaacagaggtctgaaagaggttttaatcaacttattgaggaatttgtgaacttccctgtgttgtattctttgcttcaaattattttacttttcttccttttattgaatattatataacttagttgccttttattttgcatttaggttacccattttagtatttataattcttcatgatctctaagaattttcatgagcccacaataatcactcatttctgatacattgatttactgatgccttttttagcttctgtatactttacttgaaattatgtgtactaaataatttagaatccgagtagtggcttctaaacatgtgatcatatattaagcatatattgagtaaagtatttagtattctatatgttaatagcataatttaaaaactgtatgttatgaaatatagatcctttcaagattaaaaatgtatatgcatgtagacacatatatgataaacagctctatagaaaaacacacatacagaaaagctggatgacttcatgaggacgaaatttaagagaaagataatattgtcaagggcagaggtatttttatgaacatggcaatttcgaggaggtaattgtagtttttatcagtactgaatgttgtaagaagcatttttcctaacaagaagaaaattaatgactttcttttctttttttttttttttttttttttcccgagacggagcctcgctctgtcacccaggctggagtgcagtggcgcaatcttggctcactgcaacttctgtctcccgggttcaagcgattctcctgcctcagcctcccgagtagctgggactacaggcacgtgccaccacgtccagctaattttttgtatttttagtagagacggggtttcaactgttggccaggatggtctccatctcctgaccttgtgatccacctgccttggcctcccaaagtgctgggattacaggcgtgagcccctgcgcccggccaaattaatgactttcacaaaataactttttgtacagtagtgaaggctgaagtctgactgtaggtatttggagtaatattgaaatactggaatttggactaatatggtaatattagtccaaatttcattgaagatgaaatatataaaagaaaatgaagactgtggttgaagagtattcagatgatacccttggtcttgaaaacatgggaaaggggtatatatacagtatgtatgtgtatgtacatatatgtacatacacacacatagagagaggaggtggaagatcagagccatgaaataaaaacagagaggtaagattctaccaagttttgactcatggattgtatatggtactctttcttttctacttaggtattggtttattaccagtatcaggacttgagctgaagaaaagatggatgtgcccaactccctaactaatatgcagtttctagaatactttgatttaatccatccttcctttactgagcttgcagcacctgtccccatgtactggttttatggccactttatataaagctattagagttcgttatgaatttgcactttaagagagcattgtgggtaaggggagagaccataatattgtatatggacgcgttacgctaaaatagagctcgccttattatgtacctataatgtaccagccactttcatggagacttgggatagagtagagaaggatatagataaggatacctgaccttatatagtttacattctagtgggaaagatggaaatgaagcaagactaatatgtaaagcatgtggaatgttagtgataagttccaaggagcagaataaaatgagagggtatgcatgtgcttgtagacagagtggcactaaaaggcctagctgaaaaagtggcatttgatgggggaaaatgtccaagtaagtaatttagggcctttttaggcatggggaaaaataaatgcacagccgtgtaacagcagcatgcctgtagcatcagggaaaaggtaagcgtgtggctgcagcagaaaaatcacgatgtttagcagcagaagaattcagaaaggttaaggaagttaattaagatcagaccatggtaaggacttgagcttttattcagctgtcagcgagttgagctgaatcctgttgtctctgtctgctgtgttgataatatataatcagagaacaaagggtgaaatataaagacctttagtatcctattttgaaacattcatacccctcagagatgatggggtactttgtctaatgtggtagtagtgagcaccatgataactcactttctggctatgttttgaggttagagccaacaggactttgtgatggattgaatgtgaggcttgagagagagaggggagtggaggattctgtttttggcctaaacaaaggaaaacacagattgaggcctaggacactccaaagtgcgagctcagggacatgattaggaacctgcaaaggagatggaggaaaggtgacctctgaagttggaggaaaactgtgttcaagtagtacgtgaagccaaattagcaaatacttctaagaagaaaaaggaatcctctcaatcaaatcatggtgataggtaaagtgagaactgaacatcagtcattgaatgcagtagcttgggggccaatggtgagactgataagagcagttttgatgggactgagtaagagaatagatgtgagagccagtttttgtttttgttttgaaccagtttttactttgcaagatagacctgtggaaggcctatgttcctctttgttgatacacagtcacttaaaatgaggacagttatcttcctttttcagcaaaatatatctctttagactttgtttttggtttttgtgcttttctgtgctttttaatgtatatttctgtgagttaatgggagacggtagaaattttaggaactactgatccaacctacctgaaaacagaagttcatatatttcatttgaggacgaacgtatgggtggccagatcccaggagaaatggcgattttcagtgatgtttatttacttaacctttttttttttttttttttaacactttttatatgtggttatttggacatttccacgaacaaggtactctcatcatctcttgtgtcaaaaatgtttccgtggccaggcacggtggctcacgcctgtaatctcagcactttgggaggtcgaggcgggtggatcatgaagtcaggagatcaagaccatcatggttgacaccatgaagcctcgtctctactaaaaatacaaaaaattagccgggcatggttgcgggcgcctgtagtcccagctactcaggaggctgaggaaggagaatggcgtgaacccgggaggcggagcttgcagtgagccaagattgcgccactgcactccagcctgggcgacagagcgagactccgtctcaaaaagaaaaaaaaaaaaagtttcctaaatttctttttaagattattgaagttacctttaagtagaatgagcacatatttcagtttgtcgggtatagtcttagcttatgtcaaaccatttttctcagcttaattattcctagctccccattttactataaaaactatctcattttgggaaataaatagcgagcttcctttaatcccctcagaagtcccacatggtaggtatctttattgctattttacataggaaatactgaggttcagaaaggtcgaagtactttattagggacagatagtaagcagtagagacagaactgataacagcagagcaaaaagggtgactgcaggcccttttgttgtagtatcttctttaacatctctttgttatactaaattttattatttttaatcaactatctacagctgtgtctgaaatgaaatgttttctgggctcttcactgtctcattcacactcttcaaggcatacttgtatgcatattcctcttcattttgcaatgttcctcttgaaagtaatgtgccctaacagaacccagatatcgtctgaacattgacaaatatgcagataccattgactgcttctttctggggtctatgtgtctctttatgcaccagttattcagtttatttgagctgtatacagagttggtaatcagcctatagactgtcagagaccattctgagtgacccggcattccttgtgatatcttgttggccctgctgaattaatagttaaatatgttgaacatccctaatacatccaaactataagctctgtttgctctgatatatattctgatacgctcacacctttttgaataatatccattgaaatacccctagcaacagcagagcatgtctgaaagaaagctgaaattataagtagaagagcagggttctaatattgaatctaaaacttcctaatatgatgacctttgatatacgatttaatcttactgatgctcagttttctcttgtataaaatggtatacaacaatgctgatttcttctttcttacaattattatgacatacatatggaaattatgtacataaactataatttggtagtataaggaatcttattttcaatgtggctattgcattgttttcaaaattttcacaaacctctctgtgcctcacttccctcctctgtcaaaatgggaaagtaatagtacctactttatagattattgtttttgttgtagttgtggtggttgttactgagactatttatattagaataactggaacaatgtggttaacaagatattaaaggtcaaatatgattcctgagatattcaaatataagttttgttctctgttagtaatattaattgattctagtaagcttagaataaagagattatgatgataacatttagagggctattgataatttattttcaatatttataaagaccacatagtgttctcattctactttttatatcatttcacaaaaactaaagcaaaagctcaatgtagataaaatagaaacccctctgataggagaagataactctaaaagtaactcaaagaacatcactttactcagcttgttgtcattgttcctttatgtgttgtattgtggtatatattttttctttcatctgtatattgttttctggataaagttcaaattctggacaccccaaatcctcctgtctttcttgatatttacattacatatttacttaaatgtgcttattttttctcctctaagatgctcagggtgctttccatataacatttaccttttaatggagaataaatgtaagtagtgaaaaacaagtatgccataagctgctaaggacagataacttagatcacaaaaactaataagttgagaaaatagaaatattggagcttcatctaggatcttacttttaactagatgttgtagctactctattttcatggacttttcagttcaaccaacaaattagaaccatccatgattgtgcacgttcctggaaacaattcaatactgtctttgtgaaactgaatttcaagacaactcagaagttttacctgctaattggaaagggatcctgggaacataaaatcacaaaataccacaaactgggtgctttgaaattttcaagtggaatgtaagatattaaaaagtgtctgtcactttcagagtttcttaactaattagacaaaactgagttttcatttgttgcccttcagagcaccatgtaaaatgtgtatctttcagctaagagataggtatttaagaaaataaaacaaaattactaccttatagattttttttaaattttactcttaatttattctcagttttaattagtattttatatattacagctattcctgatggagtttattctgtgaatgattggcttttttttttttttttagcattttgtactcttgatattgaatccagtattcctaattcatgaaacctttttttgtgattttaatagactccatttttagagtaattataggttcacagcacaattgaacagaaggtacaaaaatttcccatataacccggctcccacagatacatagcctgccccactgtcaacatttcccactagagtggtatatttgtttcaacagatgaacttacattgacacatcattatctcccaaagttcatagtttatacattagctttccctattggtgccacacattctgtgagtttaaacaaatttacaatgacatgtatttatctttagagtgttatgcggtgtaatttcactgccataaaaatcctcaatacttttcccgttcatctacacttctctcctaatctctagaaaccactgattgttttgtagtttacatagttttaccttttccagactatcatatattcggaattggaatctagggtgaaatcctgcggtaaaatatatagccttttcagattatcttctttaacttagtaacatgcatttaagttcttccatgtctttttatggcttgatagctcatttttaagcactgaataatattccattgtctggatgtctcacagtttatttatccattcatctactgaagaacatcttgattgtttccaagtcttggcaaatacaaacaaagctgctgcagcattcatgtgcaggaatttgagtggacatatgactcctttgtgtaaatgcctaagtgcatgattgctggatcatatagtagaatgtttacttttgtaagaaacctccaaactgtcttccaaagtggctgtgccattttgcattgccaccagaaatgaatgagagttcccattgccccatttctctgtcggcttttggttttgtcagtgttcttggattttggccattctaataggtgtgtagtggtatctcattgtttaatttgtaattccctggtaacatatgatgtgaaacatattttcatttgcttatttgccatctgtatacttcctttggtgaggtgtctgttaaggatttttgcccatgttttagtttgtttgtttttgttactgagttttaagagttctttgtgtatttcggataagaattctctaccagatatgtctttcgtaaatattttctttgagcctgtggcttttcttttcgttcttttggcagcatctttcacagagcagaaccttttaacttagtactattcaacttattaattctttctttcatggatcatccctttggtggtgtatctaaaaaactatcaacaaactcaaagtcacctctgttttctccactgctatctgctaggagttttatagttttacattttactctagagtctgtgattgattcattattaattaactttatgaattatatgaacaccacaattactttcaagcagttacacaaatttctaaattcagtggaaatgtatttatttttggtatgtttatttttcatttttattttattttttataatttcaacttttggattcaagagtaaatgtgcaggtttgttacgtgtgtatattgtgtgacactgaggtttggtgctgagcatagtatccaatagctactattttggaccttttcccctcactccctccccactctagtagtccgcagtgtttcttgttcccatctttatatccatgtgtatccaagaaaacatggttttcaaccataatgctgtgttccacaaaaatatatgttcatgttattttattttatttatttatttttgagacagagtcttactctgtcacccaggctggagtgcaatggtgtgatctcggctcactgcaacctctgcctcccgggttcaagggattttcctgcctcagcctccagagtagctgggattataggtgcctgccaccatgcccagataattatgtttgtatttttagtagagacagggtttcaccatgttggccaggctggtctcgaactcccgacctcaggtgatccacccgcgttggccccccaaagtgctgggattacaggtgtgagccactgcacccagcccatgttatcatttgtacagatatattcaatgttgaaattttaaagtgaatttgtgataaaattcacaataatgtcagatatttcaccatcaaaagtataaacttccaatgaagttgatccagtgaataacatgaaagtaaataaattggaattaaataattgtaattaaaacaaaagaagggtgtaaggtttatgcctagataaacttttttgcatgtagatgttgtgttgttcaggaccatttgtttaaagactttttctccactgtattgccttggttcctttgccaaaaatcaattgattatatttatgtggatctgtttctgagctttctattctgttccattgatttacctgtctgttcttttgccaatattactctgtcttgattactgcagttttatatcaagccttgaagtcagatatcgtcaggtctcccacttaggaaactctttaaaataaatttttaagaaaacctttattcaggccaggcacggtggctcacacctgtaatccccccgccccaccccagcactgagctgggcggatgatgaggtcaggagtttgagaccagcctggccaacatggtgaaaccctgtctctactaaaaatacaaaaattagctgggcgtggtggtgcacgcctgtaatcccggctactcgggaggctgaagcaggagagttgcttgaacccgggaggcagaggttgcagtgagctgagatcatgccactgcactccagcctgggcgacagagtgagactctgtctcaaagagaaacaaaaacaaaaagctttacatttgtagctatttctttaaattagatagtcttttcagatacataaaaatatgtggattattgtataagcatttacataatttaatgtgcttagtaaatagtgttgtctagatgattactttttctctgcaactatttctgatattgccatattatatgaaagagtttccctctgtcgcccaggctggagtacagtggcgcaatgatagttcgttgcagcctactcagactactgtgctcaagcagtccttctgcctcagattcctgagtagctgggactacaggctcctgtcaccacgcctgactaattttttaaaattgtttgtttagagatggaggtctctcgattttgcctaggctgatctcaaatccctggactgaagcagtcttcctgcccaggccttctgagtagctcggattacaggcctatctcttaactatttgcttttaaaggaatgtattagatctgcgctgtacaatcacagttaacactggtcacatgtaacctttaaattttaaattatttaaaataaataaaattagattaaattaaatattcttttattttcaagtcatgctgaccacctttcaagtgctgaatacccacatgtggttattggctatcatattggatgacacagatacagatcatttccatccctgcacaaatttatactcaacagtggtgcagactgtccatgtatctgttatttgccctcccatctgtactccagtattttacctggaaatatttttttaaatgcctgtggatgtaaatgaagtcttaaaaaatagtctcatgtagaataaccttctgcctcaaattcaagagaaatctttgttataatatgattgttaagtcacaggtgtgttgttcttactatattttaattgcgttatagttatttgaatagttatgttttaggacatacacattgttatagtcaacacttcttgatgattatagtaatgtagttctactctgtcatagtttaaaatttatgtctccataggaatattattagctaaactcaatagtatgaaattctggctattgttaactgaaataattttgcatttgtggttcaaaatgtaactcttaagggaaataaaggaattcagaaagttttttgaaactcaatcttgtcttccttggaaataggagtactttgattatttttgaaagaaaaattagcctacagcctggtatttaaatatatatgtacatatattatatatttctgctaaattatttatggtagtttattttttccatcttatatacatactggattctcaatttgatttttaataccgcctatatacttattagtaatttcaatggtgtatctttaaaagataaatttcattttagttatgtgacactttatctttcattgttatgaattgcctttttactttttgcagtcttgcgttgaaatgtatcagaaactataatgtaaaaaaaagctgagtagaaatcttataattaaaagttgtagcaagtcatgaaaatggctcatgcttttattgccattttgatgtttttgatggcaaaagtgttgagaaaaagtctttagattcacgtgataagctgacagagtgaaacatcttaaggcttgaaagggcaagtagaagttataattattgtgtagattcacagtccttgtattgaattactcatctttgctctcatgctgcaggccatagagcgagaaaaagctgagaagttcagaaaactgcaagatgccagcagatcagctcaggccctggtggaacagatggtgaatggtaattacacgagttgatttagataatcttcttagggatttgataaacacataggttcatatttatcagctgaattatatcagacaagcacttgttaaatacaaatttaaattaaaaggtgtttgtatgttttttattattctttttttaatgctaaggaaattattaggagaaattcaactttgagttcattggaagaaaatgggatgtggtagaatattttatcagtctgtagcagagaaataaattttaatgcaaatctgctagaatttatccaaataatttaagaaaataaggttaacagaaatttgaaaacattaacagtcatgttatatgtgtaaaactgatcatcatctgattttaaatcatttttgcaatatgtttttccaaacactaaaattatatggaatgttttaccgtcattcctgttttgtaataatatatatgacattttctgtgttactttttatcacttcctctcatttaaaaaagaagtctcttcgggataacctttacttttaagtaacttttttagagtgagataaaagcacaaagctagccaagtttttgtctttctttttcaagaataaattaaaattaatcttttctaatactcagtgcctcaaaagttatgtgtaccaaatgtgtcattgacatgatatgtaaacaaccttctttcaaattatcattgctatactactatatttccagataaaattttacgaaaatcagggataatgctatttccaaataagattatttttcattttgtagaagacgtttacaagaacatcataaataaatacaacaaatgtttttgttgtgcatgtcagcttttttcagaatctgcctgcattttggggcataaattctgtgtataagttattttttgccttaattgcaaatttggcattcaaaagttcagtggtcttcctagaaaatcaattcattttcttcttctaatgagtcccatgactgactgtatttggttaaaaatgaaaacaaacaaatataacaggtgagacttgagtgaacaagtttaagaacaggtaatgaaaataccagtagatttttatttagatgtatgttgcttggtaattttaactgatcaacttaacagcatattcatgttaaataaaattatgtgatctaaaaatattctcctagttgttatgtaagttccccctagaaactgtattatcactttttcattttaataagctgatgcaagagctatactttaaatggtctcatgtcatagttatatatcaagcttacctacactgaattaatcagaaataatttaaacatttagaaattacgggaatgatttttaatttttggtaagtaaaactacatgcaggatttaaatgatcgtgtgactagtgagaatattaattttcttgattatttccctcatagttctaatttttggaggcatgtagaaaagtcaggacacatagtaggtgcttagtaaatattaattgaccagattctgtttagaaaagcaaaattaaggcagtcgttgaggtaataacgttggtaattttggtgtgaaaataataatccatctgaaggaaaatgctaactttggcagataccagggaacactggggggtaggggtgtgatttgagacattcctgtttggttgactgtgttaatcaaattttatgctacccttttgttctaccagtaaagatatggtcgaactgatacgtcattaggctcaagtttgggccataactaggatgactacttaaaatgaccatagctctgtttccccattaaataaaataatttatgaaattacttaaaggctcaaatattctaacttatctatttgttccgtttttgtcgttcaaggaacaaattgcataatatttattttctgtgattgtgcaaattgtgagataagctagacacatattaagtgcctgaagtaccccttcaggtgtatttcagagggactgctaccctaaatcataatagctcctttagtatagagcccaaaagtacagttgagtggtgtagctcatgaagctgaaagacaaatgaagctttctgtaaactaggagtccagcaattattgcattaaagctcttaaatttataagtccagaatcttccttcccaagcttaggctatggagatataataaatctcacaaccacgtaagacacatacattcttgccctttttgtatagaaaggaaaatgagagctgaatcagtgtgcttcatttaggacctcatgtaaatggctgttcctcttaaccacgtatagtttcctcagaagttaagataaagatgaaccactcttgtataaaccactcatattattatgccactaataaaaatatgtgcgtatatatttataaatttgatgtgtgcttaccacagtgaaaatatttaacatatattcatagtgtaaaaatatgtagaatagcataagtatagctattatagattttaaaaaattctgtgaactatattttatatgtatctatactggtatatgcatagcaaactgaattttctacttaaaataatttgccctaagattaaactactttttaaaaatttagaataattttgtaattcatcagtttgcttttagaatgaaattccaagatggaaaaaataatttctcataacttaaattttacttcagttttgacctgaaatggtacatcagacatatttccaaatgatttctgtccgtttctaaatgtctatgaagcattgaagattcaacatcacttaagtaatgcagaaaacaaaatctgtttgtcctgaaggcaatttgttgaaggaatttaagacatatgctgagaagacaggatagggtgttaaggttgttgaaagtacaaaatttaccatggttacaatgtagaagggaacctcatttgatggtgcaaagtattgttaaaaatcagttgtacgttctagaaacagtatgtctagtaacatatgtacagtttttcagtgtcacatacaagttttatgatcaattggaagatactttttattttcactgtattttatcaaatgtgaagagttgtatgcagaattttaaaacagttaatattaaccatatcattaattttacagcaataatttgtatattaagagtttattgaccgtaagagattcttactaatttatttggaatttttaaccaaagaaatgagttggccaaattccttgcctgctttaaaactatacatggacgttttccttatggatgttccagttcttttggtcagagtagaagtgatctttcacgatcatagactaaaaagagaagctactaaaaggagagtgttaactaaaaaaaaaaatcacgtttctggcattttggcatgaaattttggtataatttttaactgatttatctctatcttagctgtattttttgtttgaactaacattaaaattaatttactgttcttatgtcagcattaattggttggataaatgtgacagaatattggatggtgcaaagtacctctttttactagagacatttttggatagctgtaattttcatgcagcttaccgtcaatatgtaagctttggatcataaccctggtctcaggaaactgttaacttaatgagggcaagtgagaggctagaccaggtatctagtgatgtatttatatattcatgtagctgtgcatattgaaaagggagtttccaaattctttattttactttttaagaaagatgtgatataactttaaggtttatttttacatttcttaatttaaatacaaaatgttataaataatttagaaatttagaaaaatttagccattaaatatagtaagtaatctttctaatgctttaataatattgctaactaataatggttttctaagattttaatttgaacagtctttaaactgatgcctttcatgaccaaggcctttcagtgtattattgagattgtggagttttaggacaacctagggctaaaataatatacatatgattatacctaaacatatgtctgtttttatctatttaggattagacgtaatcctttttgtaaaacagtgttctcgcatgagtacatacagtctcatcaatcaggcataacacaaaaaagcctagtttagataaactggttttccatattaatactgaaattaccaaaagatgaccatatcaaaacatttatttgaaaacatatgtaggcgtagctcaggttctcgttctttagtctctaagatcctttcaccataatttctagaggagatactataattatgtaatagggttagttaaattgtgattcattttcaatttctatttgtagttttctgtgtgttaattaagagtctaaggacagtcacatcaaggacatgtttaaataaaagtagtaattattagtatattagactaaagaacatctcaaaactatcattccctgagtgctagattatagtgtttaaggtgatacctgataataagtatgctaactgttgtaattaaatggcacagaatgataacactgacgagagctcttcttatccataacattaaccaagtaactatctttttttcttgtattttggttcatagctcattagataatttcacatgaattatgttatttgaggtgggcaaccagattttgtcagatgggtgagggtagggattatggtcagtctggctcatctcaaagctaaaactctcatgatcactggaaaaactttcagtagcagcaagtcttctaatcatatattttaatggcaagacatattgcaaatagtctgtatacaaatgtggcatggagactgtaccacttgtagtagcccagccccttcatcatgaatgagtagccttccacagttgcatatatttcctcttctcttattccttcctcagtactgggcagtttgatttatatttcttctttctccacatgacacttagtataatgctctacacagagttcacattcaataaatgtttttaattgacaggcacatttttcttcgtttaagtctaatctccaaaaggaagagcctctgtgggtgtgtgtgagcacggcgtgcatgcacgggtgaactcgcatgcgcagacatgtgcgtgtgtgtgtccatgtgtgtgaaagaaagagactgttgttgtcactgttgttgtgggaaatgagtggccaaaacaaatatgagtaaaaatctgactttttttaattttatgatgtttgaaaataaaaacgcaaaagggctatattagtaaaatttatattgccctcactaggggtattacttttatatatactattaatttttaaaagctattactttaagtcagtgtggtcacagaaacctctaaaatttagcctcagaacttgtcttcacaggttttgaatatctctatattacattttagactattacattgaatgctaaatggacttgtaataaccctcacttaaagttcagcaaaaataggagactgtttattagcagctttattttaagtttctattccaaatattcttttaattcaagagctctggaaacacttgttttgtgttattctaccctggcttcatggctaatgatgaatatacttgatgaggaatacttcactttaagtggcagttctgaagtacttgcatggaaggtggtgcacatttaacattattctaacagtctgttatgcactgtacacaagtaataaaattaatggatacacttcaagtaatgatccatttcctctgggtgcaatatatttattcacagactatttcaggggttgtttagaatatgagatgtgaatggattatgatccattatccctgagattctaatgtgctacaacaaaatggtttccataagtattgctcataatgcctggtgtgttagtatttgtattcttaaatagctaacacaaaattagaaaacagatgctcagatgattgatacttaaaacttttcagatatttacacttacaaactcttagaaaagttaaaattttccattgagtcaaggagcataattctatggaatacatataaaacaattatatataataataaaatccatatgcaaatatttacttggataacgctttgaaccctttttcattctagaaaggttttaatggactttcttagaaaatcaacagtagttctggcatttagatggtcaattaattcataaagttgaagtaatagcatttctcattttaattgaagagaggtacattaagtaatgtgacagtgtcggttattaacgtgacagtgtcagtaagtaacgtgaccatcctctccatcccctgcccaagtattttaaagcaaatttgatacaagagagattgtgtgcttgtttgtgtatggcttttggcttcagtgtacattggtctcataatttttatattcatatagagtacactattgatttggtattgaatgagttcatgagtacagtgtagttatactctttctactccaagctgagaattctattagatactgccagtggagacatttcctataggagtttatagtttagaaggacagtttatgcccttgttgagcaggcagcatattcacaatgaattaatacaatgtttgcatacaaatccttcatagcaagacttctgattttctgtgcccaacattatgtcttttctagtaacatctagaaatttccacgttttttttgaaatgttttcgtttctttataacttcaatctcacatgattataaatgtggcagaatattccaggattcccaaataaactctttttatttttattttagttggtgacaggctcttgctctgttgcccaggctagaatacagtgatgcaatcatagctcagtgcagcctcgaactcctggtctcaaaggatccctggttattgataaaacttctttaaaaaatgtataaatacaccttctatatcccatattagtcatatattatataaaattaggactaattttaaaatagtattattaactttttatacatgtcctgtttcagtcattaagaagacttcctctccccctaattttcacacaagagagctggtcccttgttttctgaatattctttttcatttcctctatatggcattgtctaatatgtctttgttgcctagtatgtgtcagcatttgttataagtaagttatatatgttaactcagaactttggtaagtatcctatgaggtcgattctatttttaatcctcatttcatggatgagaaaaacaagatccagtgaaattaagtaactgaacccatttcacacatctagtaaggggcatcaaatttgaactccggtctctttaacgccagaattctcaccggtcatttctctgcctttctgcctgcctccccctttttgctattatagatgtcgttcttttacctatcactgcattttcattgcctgcattcagttataaagatcaatatgcaaataaatagagcgtattataaatttcagtgttatgaatttgtacaaagctgacttttcttcaccatttaaatttcttttacagtgatatattgcaacattttttggggggcaaaacatagagttttgtgtaatgatcaacaatgactcattaaaacctgtccctagattttaacggatactgcagagcctattggtacttcactgtagttttatcatttaacaaaattaacatatccatattgaaaatcaacttatagtttcattttttcatttgctacgatttgtatggttgacctttctcagggacacaaagtgatttctctctgtgttcccgtctcatttagacaaatgttgaataagactcaatccagcatcagtctatcggtccctttaatttagcatttcttttttgcctgtttaatacctggttcatgttgacgtttcacccttcatggacttctaactgcttgttcaagttcaacatatgctgaaaatatttctcctaaatatctgatcatttagatccatgccacattttttgttattaacataatttaaaaattctgtccagtatattttctaattatctttttattttccagaaatgttaacgttttatcataatacttttttcaaacggagtgctcatacgattgaagtttcatattcttctcttacactttataccaaatgtggtcattttataacaacagttacttaatcgcatcgcttaacaaatattttggtacaatttttgatcactcctcaaaatctaacgatcaaaaacagcatgtcacaattgcttccttaagcattaggaggatattagaatatgtagctcctgtaggccacggacttcttttatacttagatatatggagccatgtatatattctttttacattctattatttccattgtatctcattaaaaatatatcagggaagaaggaggggaaaatagttgacgataatatttgcaaagtttgtctccttcaccgccatcctgagtagcattatgctttgaaattagtgaagttacagttgtgtttcaaatgaattgagggacatggtttggcagcattaatatcattatgacaaatagaacattagactatcagggcagagggaagtgaaagaggataaaataatatagttgttgaattcacatctatattttttttagtctttaaaaaggataaagtgggaggcatgtgcaagttagcaaaaccacaggccttatgtttctagagacgttcttcagactttttaagaacttagcttccctttaactaaattatattaccagaaaattaagtaaaatgaacatttataaaagtagattatcttaggcaacctactcttctaccaaactactcttcgaacttttaggtattttaacctagagaaagaaccttacagtgagtttatgttcttttgagatctctgtaggtacatgagggaacataaaacatttaaatattcagtatttccaaagtataagaaagttatcagtgctaatgtagctatgtttaaaaatgcatgatatcatatgtaatatattttctcttttatattctgtcattaagaaaactatataagctaataaatctaagaaagtctaaattttgtaaactaactttagagagtttgaatattttaacccatagcacagcgtgatgttgccatgctttcatgctatgtatggaataatatgtacttggactggcgttcgtcatatatgaaatgacatagcatattccatggtacatagtaggtactccagaatggtaatggtgataatgatatgcttgtgtttccatttttcccttgataaagttttctgggtttggtattactacagatgattttaaaactttgagatcaacttctacatttataaatttaaaaatgtttcacattagaaagattatttttcctagtacttgtttttcttcctcgcatccatggacaatatgagacagagtctcgctctgtcacccaggctggagtgcagtggcgcgatctccgctcactgcaagctccgcctcccgggttcacgccattctcctgcctcagcctcccgagtagctggaaccccaggcgcccgccaccacgcccggctaattttttgtatttttagtagagacggggtttcaccgtgttagccaggatggtcttgatctcccgatgccgtgatcccccacctcggcctcccaaagtgttggaattataggcatgagccaccgtgcccagccgacaatctgtttatttctaatcttctgtaaatgaaataaagaataatcttggattttttttcctctttttaaaactatgaaaatactatttaaactaatttccaagcccatttttaaaattaaaaatgtaagttagtttggggaagtatatttgagtaatatgtatgatatgtaaaatgtatctgaaaacatccaaaatgttacttgttcatgcagccttccagctcccatcagagctttgagcacttttgtttttatttaagtttttatttaatattttatttacatatattctaattttctacatcttatgtcttattacttgatggcattgatattcattgttgtgacgcaagtctgataattcacattgaataatctgaaatcatatttacacatttatatcttagaaaataattgatctggtttgaaatcattcatgtggtgaatacttttataattaggatgtgttggctttcagatcatttctttcagtctgtgggttcaggggatatatttaattatttttttctttctagagggtgttaatgcagatagcatcaaacaagcctcagaacaactgaacagccggtggatcgaattctgccagttgctaagtgagagacttaactggctggagtatcagaacaacatcatcgctttctataatcagctacaacaattggagcagatgacaactactgctgaaaactggttgaaaatccaacccaccaccccatcagagccaacagcaattaaaagtcagttaaaaatttgtaaggtaagaatctcttctccttccatttggagcataatcaataggtatttcttggcaatttccaagaagacagtaacaaattatttagtaatgaaacgttcaccttctaaggatttagctaagcgcaataaagttcaaaatgtaagcaacagaaatctgtttaaatatgtaagacgtagatacccggattctaaaattgtatttggcgtagttacacagcgctaattgattgtgtcggtttgcgtaagcatgaggcagtttaggagtgtggaaaccacatgtatcctgtaaaaaatggcctctcactttggaactctttctttgtgacgagtgaaacatagtcattttgaaaaagtggaatccatggaaatagttagaaacacgggtcaacaacaagcttggatgcagtataactagatacataaggaaaatatttaaaactgatggacctctcaaattacgataatttgaggaaggtttctttacaaaaagatatttttaaaatgtagctggagtacagaggaaccacaccggatagtgtagtaacccagcatcagagttcttaccccttttagtccagaaaggatcagtgagagagcagttatagaaactcagaaggagacagtcagatcctcatggtaaaagcagcatggccggcttaaggaatcctcatagaaatggagtcagacaaataaacaccccacttcacttttttccctgcctccagaatcttgtcagggctcctcactgactaaacttaatcgtaagacaaaggacaaggaaccgtcatctgtaaatatcagtctcctgggtaacaggagaagagcggacagtggatctggaggggcaaacaagatgtaagtggacaaaagggcctgagaaagagatgaaaggattatgccttcaagtgtaagaaaacaagagctgtataataatgaaaatagcctaaactgttttcattgttactatgagctatgtgcttttcgcggggaatgagaaactgattagaggatggactaaaacgtttccaggatgaacgtttagtgatagatcgagatgattacatttaatacaaaaggcaaggagtggagattcatttgcatactgtaaaaaagaatggcttaaataaaggtagaatagacatggaaaggtgacaaggttgatttagaaaaggtattggacccaaaaagtgatgagaaattcaaagctattttgaagagaaaaacaattgaaggacttaatggttcttcaaatatcggacctgtagcattattaggttttctgttcttgtgttagtttgctgaggaaataaactcagaaagtatacttttggataaagaataccttggataaggcacttgacttgttaggcaaatacacacatctaaggaatttctacattgagatgcattttgtaatttaagaatagaaccaatgccgcttttcctgtgaatcagaggaataatccaaatacattatttcttgccacaaaaatctgatgttaccttatccgattcttgagattcagatatagtagttagtaatagtacctacacagtacattcatgcataaaatatatacattaagtgtctctaatgtgtttaagaatgctactgagtgtattaatcagctgagtctgccacaataaataccacagactcggtggcttaaacaacacaggtttattttctgagagttctagaagtgagagaaagtccaggatcaaggtttggtagggttcagcttcatcttctggtgaaggctgtcttcctggcttgcagataaccaacttctcactctgtcctcacatggctttcctctgtgtgtatacatgcagagagagagaatgagggctatttttctttctctctctctttatctctgcctccttttataaagccaccaatccctaagggattagccccccaccccgccacccttacccaaccctgatgacgtcatataaacatcattacctcttaaaagtcctatcaccaaatagtctcaccaatggttaggacttcaacatgtgaattttggaagacacaattcagcccatagcactaagttttgggaatattagagtgggcattcatggactctgcttttattgtatttacggaaagcagagaagagagatatgaaacaatggaatcaatatttttaaatttcctgctaggaacagtggtttaaactaagatgcaaagctttgggagaatgagtaacagggaaaaacgaacctgatacagccaccaagggcatcttccttgagggaggaacatttgagttgagacttttgtgataagttagaattaggtaagagaacagttaagcaagattccaggcagaaggaacatggcaagagggagcaataaaggccaagcacctgaatgaagaccattgtaaatgctgaacatagaggggcagatgaatgagaggagagacaaacaggaatcagtcaggtatataggagacaaaccaatgacttctgggacctgctagtatcttggtcttgatttgaggaacaaatggagatcaccagaggttttatatattaaatattgtctggaggttgaggaagtcatcctaagggaaaatacttctcttactgcatccaaattccgttgtcacctccttatcaccccttactctttctctcagacccattggtgtctattaatttgaagaatcactttaggtaaaatatttagcaagataagcttaatattattcatacaagggcaaatatatatactgttctgctgagattagtgataggtaaataaattataacatgtttctcagcgttttattttatttggagaagttttataacattagagcgcatatttagctcatattctaatgatcggcagaactggtttttaatattgtgggggttagagagccttatcagaattggaaaaaattcatgaaccctttcctgtgaaaaatacaaaagcttccatgagataagcatataattttaaagaataaacagactcaaaggagataccatactctggaggaccaactaaaccaaatccttttatggaaataatggctaattgttcacatctttttaaacacagaatacttcagttgaaaagtatctcttctatgatttattctcagaacattaaggtctcaactgaacatttgcccaaatgttttattagtttcaaagtcccctttgtttttcagagcacacttggctataatgttggctctttctatagccccctgaacgggaaaaatggcagccctccatctggccaaatataaatcaggttcttaatggttcacagtagatgccaatgctgccatttgtaaatctagcatacaaattatttgtatatatttctgtactataaatacagaatattaccctttacctcttgtcttatttcttatccatggatatataccaactttctagcactggtttgagaggatttatatttgaaagagaaatataggtcaccttccattttgctaaacgtctttaatcttcacccaccaaaacgattgaatcgtcagagattattttacctgaatcagctcataccattataaccacataaacacattcctctgaaagctgtatttatgtttttttaatgagaataagtggcattgtacattagtcttgcaaccatgacagaatttatgtgataaatttctcagcctctcctaatacaaaagttactctctcccaaagagtatgaatgcctccataaatattaactttttttttgccttttcactttgattttcaggaagctcagatttcaattcgttcagaattggtataattctttccattttctctttcttctaatgggctcatgttccaatttttaaatttcaattttcctgttgttacatattaaatagtaactaaccctcaagtatttttttctaaagacagcatatatatgaattgtaagtaagcagccatgataataacacttttaaaaagggcagtgaaaactttgagttcaaattatatatgtattaaatacgaaacaattccaacttcactggaaacaagaacatgaaaacatttatgtagagaatagcatgcccttcgcccactttttgatggggttgtttgtttttttcttgtaaatttttttgagttcgttgtagattctggatattagccctttgtcagatgagtaggttgcaaaaattttctcccattttgtaggttgcctgttcactctgatggtagtttcttttgctgtgcagaagctctttagtttaattagatcccatttgtcaatttgtcttttgttgccattgcttttggtgttttggacatgaagtccttgcccatgcctatgccctgaatggtattgcctaggttttcttctagggtttttatggttttaggtctaacgtttaaatctttaatccatcttgaattgatttttgtataagttgtaaggaagggatccagtttcagctttctacatatggctagccagttttcccagcaccatttattaaatagggaatcctttccccattgcttgtttttgtcaggtttgtcaaagatcagatagttgtaggtatgcggcgttatttctgagggctctgttctgttccattgatctatatctctgttttggtaccagtaccatgctgttttggttactgtagccttgtagtatagtttgaagtcaggtagtgtgatgcctccagctttgtcctgttggcttaggattgacttggcgatgcgggctcttttttggttccatatgaactttaaagtagttttttccaattctgtgaagaaagtcattgtccaaaagaaatacagtgctagccacaaattcaagccacatatgtaatttaaaatggtctagaaactatattaggaaaggaaaaagaaacggtaattgaatttcaatagtacattttatttaacctgattcatcaaaaatattatttgaaagtgtaatcagtatttaaaaactttgagattatgttcttagcttttcttaatcttcagaattaaacatattttggtaatttcatgcatctaaatttggaccagccacatttcaggtgcccagttgccacatgagctagtgacagtacagcagtgttcatgtgattttatcatacaaaccagggtactactgagagtgaaacagggtgctactaataattatgccaggacaacaagaggaaacctggacagccaccgtaatttaaaaagtggcaattggctgggcgcggtggctcacacctgtaatcccagcactttgggaggccaaggtgggtggatcatgaggtcagcagtttgagaccagcctggccaacagtgaaactccatctctactaaaaataaaaaaaatttgctggacacggtagcgggcacctgtaatcccagctactcaggaggctgaggcagaagaatcgcttgaacctggaatgtgaaggttgcatttggccaagatcgcgtcattgcactccagcctgggcaacaagagcgagactctgtcccaaaaaaaaaaaaaaaaaaaaaaaaaagcagtggttgcctgtttggtcaggagaagtaatgagaccatacaaaacatagaagattatagatatatttttatatttgggtgtgtacatacatatgtataagtattatatagattttatatgtgtgtatataatctatataattgtatcaaaatatatttataattatagtatacacatatacatatatgtaggtatatatgtaatttatattttgcagaaatgaaagagaaaatattgttcattgagtgagcttaaaatttgaagcaagcgcacatcattttgatataagaggggtgcagccaaacacctatatttgatttatggaaaggatttaaggtcatgcatagtatttttccactgtacgcattcatacccattaatgctctaaattatgtcatcttgaaatttaaatatcattatataggatgatacatattgaacaaagagccaaggtatccttaaatgtatggctggtgatagaggcttgtctatactgtcatggatgtttcttatcagatatttgtgaagggtattaagctaaacttgccttactgctttttaataccttcttttgcaaaatgtaatgtatgcaaagtaaacgtgttacttactttccatactctatggcacaggatgaagtcaaccggctatcaggtcttcaacctcaaattgaacgattaaaaattcaaagcatagccctgaaagagaaaggacaaggacccatgttcctggatgcagactttgtggcctttacaaatcattttaagcaagtcttttctgatgtgcaggccagagagaaagagctacagacaagtaagtaaaaagcctaaaatggctaacttgacattttccaaaatggttatttgtggggaaatccagaaggtactaacatgaaacaataatttctgtaaatggaaccattctccctacaacctgtattaacaaggaacgaaatactggtgtaacagataagctgtctgtagatttttttgtcctcataataattttgtgactttgagaaacaaaacatgttttgtatgggaatagcttctccttgggggattgtagatttcaaaatcagatgttttgaatatagaagaaaataaaagagcagttgaggtcatatgaatacacttcaattaagtctggctcgctgtatatacaaggatatttgctaggcatcttctaatatttctgtcaatttatctgaagagtattatagctttagcatacatgtggcaactgaaactcagcaaaggacaaattattctttgggctacattttactactggatcactataattacataaatcctattttttcctttgatgataaaagataaaagtggagcaattatgcaaattcatgccatgcgactagcaaatttttcaagatgtttcttttgtctcttcctgaattgctttaataagatgatgttaatacatagtatctgctccaaaatatctctactcatcaacttagttttaagacaaaaattcttttcagagacagatgaatgaccacctttaagaaatagtaaatggggttttgattcactatatacatgcatatatgtgttcatgtgcacacaaaaggaattattgagtaaaatcgggtttgaaggcattaagataaaagtatttttctgaaaaaatctctgtcccaaatttgtcatgagaagcacaggaacatgtgtttgtttactactaaaacttaaattagttggaaaatatattatcctattgcttttctttgtaaatatttaaagaattcaccatataatatcatttccagaattaatgtagtgatacacaacgcttttctcatttcccagcttttcattttttacaaaaatgaaatgagctaaataaagcaaaggataaatactttttttttttttttttttttttgtacttcagagtcgtttttgctaaggggtttattttcctgtacaggtagtaaaactttataaatagtatcagctccctctagtggatttcagtatacttgttactgtgcctctgcaaaatcaatttgggaaaatattttaaatgtcctagattttcaaatattgacatatttaacaataatgtattttcacttgtcattacatacataactcccccttaaagttaaatacatttagtggctatgcagcaattgttgtgcaaaggagccatttcactggaaatttactttaatctgtatatacctcttaatcatattaaagttcaactttttatcatttactttaaagatgttcagaatagcaatgtttgataactgagatttgtctatgatgttacaatataaatacgtaataatatatagtctctattcatacagctctccatccatccatccatccctatcatctttcttctcttttttaaatttcatacctacaaacgatgattgtttataaaacttcctaactttttcactgctattatatgtaaacaaattgtccccacttccactgtagctacacatctttaattttactattcacccttttggaatgcttgtctagattaataaataaccctttaattaaatatggtgtatatatatatatatatatggaatgaaaaatgtagcatatgaaattacatagcagttgattttgttaatttgaaattaattcaaataattgcacatgtgtatgcattatatccgaactggcaccagggagtaaatctcatttcttgtattcctccacagtactttggacgtattaagtatgcaggaaataagagctaacagaagtgcctaggcatccatactgacttttatttcctctttacttttttaaacttgctttttcacacaaaaacctggcttttaaaatatactatcagtgttggaaaatggcataaggaattggtagttgttacctgacataagtgatagaagaaaataatataaaaagataaaattctattttcaaagcactttttactctatgcataactaatttatacatcattttacctaaccctcagagagaaacacattgagtatttgttattacaactatatcacaagtaagctaatggggtttgaataactaaaagcatggatatgggatgctgtaagaactagatcgtatacacgaatgtccataacaacattattcataatagccaaaacgtagaagaaacccacatgtccatccagtgatgactatatgaagaaaatgggcacatccatacaaggcagtgttactgagcaataaaaagggagaaagtactgatacatgctacagcatggagtacccttgaagacattatgctgagtgaaagaagccagtcacaaaagatcatatgttatatgagtctcttgatataaaatggccacaataggcaaatctgtacaggcagaaataagattagtggttgcctaggtctgggaggatgagggggtggaattgtttcccatgacagttgataaaatacttttctagagactgaaaaccagtaaactcatgttatatgctagatgaatatagaaacacagcatctagtctgttgtagataattgtttcaacaaagaaaaaaatgaaaccttatttcttaatgtaaagaaggaaaaagattggtcatataatttgagtttatttcattaacaatttggaaatcatgttaaaataattattagggattttattggtttggtttagttttgcaaaaatggagaaagtgacattattagttatgacaaagccagtgttttgactgttctaaagtttcaaaatgattctcttctgttctacaccattagattgctttcagaacagagtcttgctcactttttcactaataaattcaagaaatatttttgaacacctggtatatgccgtaaaagtgctgggcactaggtaatatacatggtggagaaaatcaagagcaatatgtcttcatggagcttattgaaagaaagataataaaattgaatatctgaatattattgcagattataattactttggcgtctgaaaccgtgattctggggagatgatgttagaaccaaacctggagaatgtgcaggtgccagctatatgataagttggagaaaggacattaggagaaatgaaaagaaacacaaattgccaaaggtgaagaatgagggcttggcatgtccagaagacataagggaggccagaaaggctggaatgtaacaaatcaatgaaagattaggacaagatgagggtagaattgctcttatagaacttctataacaggtttggattttaagagcagtagacatttccgaaagaatttcaattgaggaaattaagtacccttagttgtattttttcaaaactcaccctctagctggtatgtgaagaagaaatgcaatacaagtctgaggagaagcaggaagacttgtggaaagaatagccacacagaggagagtccattgaaccttaaactacagttgtgataagataaagaaaaatcatttcaacccttgaagaggtgatgatctggggaggtgtagcacagaagatattcttgccagaattgaaagaaaataacttttacctcttacagagacagtagaagaaaattttaagggtagccagcaaggatgctctccatggccacaatttcaagctctatggttagtctctacccctccctgttaggatgctgagactgggaattaaaacaaagtttgatgtgaggtaactcttctagctgcagttcaggaaattgacctaatttactttattaaaattttaaattttttattttaaaattttatttttaatacatctaggcaaaggaatgttttgttccagtagacacataatctgttgcattgctccttcactccagaaactaggtaaactgtttgtaaatgttccttttaaaaattgtgttatttttatcaataccatcaagagcaagcatagcagacatgtttatttaagcaagctatgtgcttattgtgagataaaagaattgttccctgacctcaagaatcatgggaaaactcgctaaatgccaagttaaagctatacatatatatatacacacgctgtgtgtacatatacgtatatgtacacaagttgtgtgtgcatatacgtatgtacatatatacacatactgtgtatgtacacacacagacacatactgtgtaaatactcacgtaggcaaatattgtgtatatacacacgtagacacatactgtgtatatacacacgtagacacattctgtgtatataaacacgtagacacatactgtgtatgtacacacgtagacacatactgtgtatgtacacacatagacacatactgtgtatatacacatgtagacatatacacacacacacacacacacacacacatttataaaatttatgtgacaggaacctcatactattttccaaaatggctgtactaatttacattcccaccaacaatgtgtaagtgtacttttctccacagcctctccaacatttatctttcatcattttgaaagtagccgttctaattttaacatgtgtaaggtgacacatcattgtggttttcacatttttctgatgtttagagatgttgagcattttttcacatatctgttggccattggtgcctcttattgcgagaaatgtctgttcatatcccttgcccatttttaaatcaggttatttgttttcttgctgttgagttttttgaggtttctatatattttggatattaactccttaccagatatttggtttgcaaatattttctcttgatctgtgagctgcctcttcactctgttaatagtttcctttcctgtgcaggagctttttagtttgatgcaatctaatttgtctatttttgcttttgttgcccatgccatatccatttgagcattattcataacagccaagatacggaaacaacctaaatgtctattacaggacgaatggataaagaaaatgtgatatatatagtgatatatgcatagtggtagatatatatagtgatttatatatactgatatatagagatatatatactgatatatatagtgacatatatatatagtgataaatatattccagtgtctatatatgatatatatatgcaatggaatactatacagtctttaaaaggaaggaatttctgtcatttgccaccatgtagatagaactggcggacattaggctagctgaaatgagccaggcaaagaaagacaaatactgtatgatctcacttatatgagaaatccaaaaaaaagtcaaattatagaaacagaaaatagaaaggtagttaccagagactggggggaagaggaaggttgggaaagggaaggtgttgatcaaatgatagaaagtttcagttagactggaggaataaattgtagcgatctctagtactgcgtggtggacacagttaataaaaatctatgtttcaaaattggtaaaagaatagattttaatatccgcatcacaaaaaaagataagttggtgaggtgattaatatgttaattaacctgagtgaatattttacaatgcatacatagatcaaaacatcacatgataccccataaatacacataattattatttgttagttaaatatgaaatagtttaacatgatattttgaaaataggattgctaagtggatagagctgcttttagaaaaagggaaaattcagcaaaagaaaaaaactcttaaattctaataaatatttctgtagtgtggtagtttatacttacacaaagttggtcagaaaaatgagacttacctggaaaataaatcagttgtccaggaggtgaataatagagcagtatttatgaaaatgaccccaatttcagttggttcattggagttttatgacttataaaacaaattctatggtgatcttagataaaattcctataaacccatctatttcactcatgtcagaccacaccaagtgccctttgtgagaatggagcctgagcagcagcgactttcagcagagcaagttgcataagcaaaaaggcgtgaagtaattaaaaggcatattttgactggaggatagaatattgattttgataggaaattgggctaaaatgttgattgaattcccaatcacaaagatccttgtatttcaaactaaggaaacaacttatatattgacattagaaattcaagttatactcagacttccttgcacttgtaattatctgaaggaccattcctagtatgttaatcatcatatatcatgcatgggtcctgttgtatttcttgacacctttgtcagtgttcacattttagagaaatgcttacttttgtcatggtctatgttatttaataaagtttggagcctttgctgattgcattatctccttgactttagattgatcatggggaatgaggaaaaaggtgggatctggttggcatggaattaaaggctcaagttgagcattttgccgaagtaggtatatgtcattagttcagcttcttcacacatgtgcagtgcatttttttccccacaggtaataatggggaattcaaattggactcgatttcatattcacaacaggacttctaatgtttttaaatgctgtcaatattaagactactaacatatcatctctttctccccctaaatggattacatgggtgccttttccagcttctatctaagcactatccaacagaaaaataatgtgagccatatatttaattttaaatgttctagaaaccacattaacagatcaacaggtaaaagtcatttgaaaatattgtttcatcttagaattaaaattttaaaatgtggaaatagctttacattctttttgtatgaactgtccaatatctggtgtgtctttatatatacaaaacatctcaactcaaactggccacgtttcaagtgcttaacggacgggtagccagttgctaccttattggttggcacagttacgtcttccttctctctattgtacattctctgatgcttaagtgcctattttctgagtagttctatttttcaagaggagagattttttttttcagtaaagtgttatatataaccgattgctctggtatctctttatctcgatagttatgtctctcagaattttcaatatacttctctgtttactttgctttccagttaaagtggtttgcccttgacatagactcatgtgtattagaaaatgtagcatctaatttcatacttagctcttttgttatcacaaaagaatcttgctttgcctctcttggtctgtcctttgctctccttttttctctcttcttttccctttagcccctccctcttttaagagttaaagacaagcagtttttaaacaaaaggtgcagaaaacttcttttttgtattcctttactataattttagatgtcagtttgcctatactttatcacttccatccctcacatggctatattaaatgtctagatattaatggaatttttttttttacttttcaagataaacagtagtgcaggataggagcccttaatttttattttcccaataatttacagcacgtgcttccaagcttgcaatcacttatattgattttcattttgttgaatatatttcactaataaaaccaaaaagatatctgcatttttaaagtggtcctttagcagccgaatagtagaaactgtcataggaatactttctttagagaaaaaagttacatatttataagcaatatattggctaaacgttaaatcttcaggccatatttttcctgagtctgtgctgagtctaatgatgtcagtagaactctcgaggtcttttaagatggtaggttattagattggatatgtttattgtcttattgctgtcagtaaagataaacttatctgttggattattaatctctatttctacataaaaggaaaaaaagtgagtttccgtagatggagctggtctatttctgctcctatgttgggatcacaagggcagcatctacagatatctcaccagctagtaggtggggcagctcatactgtgtttgcccttgggtacattagcttctgtataagactttttctttcttcttatctgaaacagatttagaattcttcactggcattccctggcctgcatggtttaaatgagatactctataccgttgcaaatttgtcaagcatttcctgaaccttgatagcaattactgctgtcattacatagtgtcattacattccacataagaaaatcagaaaaagaaattgtgatatttatgttagtaggtgtgtatttttttttccagcttgcctcacaaactatattagatggacaagttcccaaaccaatctttggaagtttatttcttaaagctacaaaagaatttccaagagattagattttttgaaatgaccagtttcaaatgaatttaatacaaaactaggatgagggttggaatgcaaggaggaattaaaatatgcatgttttaattatagtttaccaatatgaagtgattcctgtgagattcagttgttggacagatcagaagttatacagaaaaagatcaataattcagagactgaagtgtttcagttttcattaaacagaaagaccagaaagaagttaaagaggagacatgttcaagttcaattaaaccaaattttatgaagcttatgattcatccaacataccgccatgtgtctgcccatagtcccctctccttctagatcatttgctgaaatgacatctcagacacaatcatttgcttcattgtaactaaatacctctttacttcactgctatttataaggtcccttttggattttgtttattaataatcatctagaattcaaataaatgcatatgccactcttgccactcctcttcagcatagtactagaagtcctagccagagcagtcagacaagagaaagaaataaagggcatccaaatcggtaaagaggaagtcaaactgtcagtgtttgccgactatatgatcatttaccttcaaaaccctaaggattcctccagaaagtttctagaactgataaaataattcagcaacatttccagatacaagattaatgtacaaaaatcagtagctcttctgtataccaacaacgaccaagcagagaatcaaattaagaactcaaccccttttacaatagctgcaaaaaataaaataaaataacaacaacaacaacaaaaaacttaggaatatacctaaccaaggagtcgaaagacctctccaaggaaaactaccaaacactgctgaaagaaatcatagatgacacaaacaaatgaaaacacatcccatagtcgtggatgggtacaatcagtattgtgaaaatgaccatactgccaaaggcaatctacaaattcagtgcaatccccatcaaaataacagcatcattcttcacagaattagaaaaaaaattctaaaattaatatggaaccaaaaaggagcctgcacagccaaagcaagactaagcaaaaagaacaaatctggaggcatcacactacctgatttcaaactatactataaggccatagtcaccaaaacagcatggtactggtataaatataggcacatagaccaacagaacagaatagagaacccagaaataaaccaaaatacttacacaaactgatcttcaacaaagcaaacaaaaacatacagtaaagaaaggacacccttttcatcaaatggtgctgggataattggctagccacatgtgggagactgaaattggctcctcatctctcacattatacaaaaaccaactaaagatggtttaaagacttaaacctaagacctgaaactataaaaattctagaagataacattggaaaaaactttctagacattggcttaggcaaggatttcatgaccaggaacccaaaagcaaatgtaataaaaacaaagataaatagctggtacctaatttaaattaaaaagcttttgcacagcaaaaggaacaatcagcacagcaaacaggcaacccatggagtgggataaaatcttcacaatctatacatctgacaaaggactaatatccagaatctacaacaaactcaaatcagtaagaaaaatacaatcccatcaaaaagtgggctaaggacatgaatagacagttctcaaaaggagatatacaaatggtcaacaaacttatgaaaaaatgctaacattatgaatgatcagggaaatgcaaatcaaaaccaccatgtgataccaccttactcttgcaagaatgaccataatcaaaaaaattttaaaaagtacatgtttgcgtggatgtggtgatcaggtaacacttctacactgctgatggggatttaaacaagtacagccactatggaaaagagtgtggagattccttaactaaaagtagaactaccactcgatccagcaatcccattactgggtatctacccagaggaaaaaaagtcattattcaaaaaagatacttgcacatgcatgtttatagcagcacagttcacaccagcacaatcgtggaaccaatccaaatgcccatcactgaatgagtggttaaagaaactgtggtgagtgtgtgtgtgtgtgtgtgtgtgtgtgtatgtatgtatgtatatatgatggaatactactcagtcataaaaatgaatgaattaacagcatttgcagtgacctgaatgagattggagactattattctaagtgaagtaactcaggaatggaaaaccaaacattgtatgttctcactgatatgtgggagataatctatgaggacacacaggcattagaatgatataatggactttgggaacttgtggggaaggttggggggagagagaaaagactacaaatagggtacagtgtatactgcttaggtgatgggtgcaccaaaatctcacaaatcaccactaaagaacttactcatgtaaccaaataccacctttacccccaataacttatggaaaaataaaaaataaatgcatcaggttaatagagaaacatattatttatgtaaattaaaacagattttaagtactacaaatatcttttaataagaaatcagaagtgctcagattaaatataatctcttaacatttttatgagttcccaaataaatgcaatataaacatattgaaaaaaattatccatttctaacatttcagcatccattgccaacacactctctaagattatcgcaaccatctgaatactacattaaatacatgcaaaatactttcctatattcttctcatttagtgtagaaggaattggtatattgaaatgacattcatatcccagcaattaaaataatatgatttagataatgttatttgatgtggtgatataaaccaggactttgcagtgtgatttcatgtatttagaaacattattagccattatctgtttaaatatggcttctgccacattctgggatgcatatatattagaccgttttactgtgttctctatctttttgtgtctccatgcttcattccaggtatttccttctgaatcttaagatttagtaattttctatttacccctgtcaaatttgctgttaaacccatgcacttaattcttatttttcacttactgtatttttaattctagaatttcttttggattatccctaaaatatgttatgtcctttttatggtttacagttctctgcagcgttctcaatcttgtgtctaatctctttcaatatagtccatgtggctgcttaagtcacatttcatatatatacatatacacatacatactttaaaacgtataaacttgtttgtatatacatactgtatatctctatataatactttccctaatataattatacatataaaagtatatacatacacatatgcctctttaatagcctgttttctcaattgcaattgggattaacaatgtatatgtctcacaggtttattataagaattaagaatgataatatttatggggttattactagagttcttgatacatatactaagcatgcgtacatgggtgttctttcagtaaaattagacatgacatgatataatttaaaaatcaaggtcttcggataatgatactattttttttccaaggcaaatgataacactgagagagagtagcctttcagtatcagatacaattggaccctgctcggtttctgcaaataccatctgtatcaccttgggcaatttacttagcttctctgtttttctgtttcctgcccttatctgtttttctgtttcctgaccttataaaacgaattgaacaatatagattttacaggctgatttgtgaatttaatgtaatatgtgtaaggtccctggcatattacacatgtagcaggaatgtatcttcataatcatattaaatatatttttcagattttctaattttgttaatatttgaaactagtaatataattgagtttgctgacaatttaggaaaacatggcaaagtgtgaaacaattaagtgattctcattcttttttcccttttgataaagtttttgacactttgccaccaatgcgctatcaggagaccatgagtgccatcaggacatgggtccagcagtcagaaaccaaactctccatacctcaacttagtgtcaccgactatgaaatcatggagcagagactcggggaattgcaggtctgtgaatatttgaatgtcaaaacaataaagcacgcttatcaagcattcacattgatataacctttaaataatattagaatttaagtcattctgacaagtatggtagtttgcccattgagcaaatgaaaatgagactttacagtattatttatgcatatactctatctatggatatatatgtatgggcatatatacatgctgtttttgaaaacaattgtatgatctatttatgaagtatatttttaatttagcatgcattttcagatgtattgattttgattattagaaaaaccattgttttattccccacctttgcttctttatttgtaactcctgtcacattctcaaactggtgggtaaaatcagtgtacagtcatcccttcgtatccatggggaagtggttccaggaactcctatgaatatcagaattcacagatgttcaagtcctttatatgaatggtgtaatatttgcatataacttatgaacatgctcccatatactttaactcatctctggattacttataatgcctaatacaatgtaaatattatgaaaatatgtgttatactgtattatttaggaagtagtgacaatgaaaaagtcttacatgtttagtacagatgtagttatttttgtcaaatattatctattagtagttgactgaatccactcattcagaatccacaaatatggagggctggctatatttataaaattggtttaaatttaaacattaattttctgtaatgtaatgagacatttgaattctaatagctacatttttttaacatccttctatcaggaaagatatactaatatgggaaatgaaagaaataatttgtaagagattttataatacttttcctactttattttatttttagacggagtttcattcttgttgcccaggctggagtgcagcagtgctatctcggctcactgcaacctacgcctcccgggttcaagtgattctcctgccttagcctcctgagtagctgggattatagtgcgtgccatcacgcctggctaatttttgtatttttaaagtaaagatggggtttcaccatcttggccatgctggtctcaaactcctgacctcagatgatctgcctgcctcagcctcccaaagtgctgggattacaggtgtgagccactgcgcccagcccttttcctacttattataaaatactacattatatgttcaataactttttatttctgaagacatgaaaacgtattagttatatttagaagctgagataatatgtgcattttaagaaaaatgtttaaaaattcaaatttaaactttatcacatagaattttttttggataattaaatatttttttgaagtaatgtattcaaagaaaaatacatttaaacaactttcattatgtattgtcctatttagatatttattctactacaataccaaatggtagctgtttcaccttttttgtttccttttgttgtggtttttaatgcttggcataatgattccaaagtctatctggaaaaatgtgttgcctaatagaactagtaaacttttaaacataagaataaaaatgtgcaagaataagagtggagaaaacacaagaaaaggcagttagatgagcagaagagactatttccactgaaaaagataggaaagaaaataattgttcataaatattattgggaaatgtattaactaactaaaaaaaaagatatgaacatttcccccaaagttacaccaaaataaaaaccacatacaataaaatgttcaaaaaatgtggggaagcccaaattttggaaaatatttaaaataataatgttataaaaatttaggtggagaagcataaaaatcgatggaaacaatcacaaacattgtaaaaacaccagagacaattttaaagaaatatgataccaaggaatctttttttttctgtgagtaaggaagaaagtcttgagtaaggtatcctccaaaaagagacatatatgaataataaacctatgaataattgtaacttaaattgtaaaggaagaagtaaaaaaattacaagatgagaattttttttgcatactaaattgcatacacacaaaagatataagtaccaatttgcaagtggtgaaataaaaattgtctcttactgctggaaatgtaaattcaatatgaattttactgaggttaactcttcagtgcatcctaataacatacaacattaatataatttccatgaaatctgtatctgatggaaataatcagaatacactcaaagatgtaaatggaactggagatagataggatattgattgattgagggatggatggatggattagataggtaggtagatagagataaacataatttacaggagtggaaaactagaaatgaatgtgtagaactaataatggaaattgttgaactagaaaagccattacaatttttgtttttgaaaaaataattatttgacatgggcaaatgctcacactaaaacacctagctcaaagtgtagttatatgctagatattgtctaaataatcagtcataggggaacaatttgaaaaagtgaaataaacttaaaaaagtaaagtaaaaaaacaaattaagtaccaccaaataggcataggatactatgaaactataaaacttagatatttgacaaattttgggttgatataggtcacattataggggaaagaataactgtttatatgtgcatacatgatcatatatttaatatttagctatacatagaacaaattgaaaatttatataaagtactagtagttctggtttttttttccatttttgtcatgagcctttattattttataaagtaaaagtaacattaaagtaaatattgaacaggggaagtctaaagttatgatcctactgtaagaaattacatgtgttatacagaataagtataaataaattttataaattctccacaaaactatccttgaatcccaccataatactacataacagaataacattttttgaaaatatattaagtacatagattgttcaataagtttttctattccatatatcaatattattagctatagttttatgtagagtttactttcctgaaagctcagtataattaatttcaactccattaactgtatcacaaatgcagttattaatatatatacttaattcagtaaaattagatgcaccaaaactttttggctctgtaagatatagttttgagatatatttgacattgttcagaaaaatacatatggagtgttaaataccactaaataatattcaagttactcttaggataatatgtaaaatttaaattaccactagaagtttataactgatagaagatcatctactttgtttacatgtttgaatcatatagatttcaagtacagttaatttcactaaaactcatcaattattattcatcaattagggtaaatgtatttaaaaaattgttttttaggctttacaaagttctctgcaagagcaacaaagtggcctatactatctcagcaccactgtgaaagagatgtcgaagaaagcgccctctgaaattagccggaaatatcaatcagaatttgaagaaattgagggacgctggaagaagctctcctcccagctggttgagcattgtcaaaagctagaggagcaaatgaataaactccgaaaaattcaggtaattcaagattttactttctaccctcatttttatttacttgttttttccctaacgatacactgtaaactgtaaaggtacataagcatttgaccttcagcatctttcaaagttagtgagaagatgaaaagacatgagtcttttacaaaggatggcgatttgcttattccttctaggaaaagaataggagttttctcagtgtttttagaatgaattttctattttcaccattaccaataggaattaaacatgtttttagtttaataattttcaaaaccaatcatccatttagtctggttgtcttttaagatacgggtaatcatttagcttatgactagaaaaaagttatgtatatatacattatacagaggtatattgtaatcattttatatatataatgtatagtatgtatatgattatttcctatattacctttcatttctgctgttttgctacttataaaaagtaggagtcaactatgctgtctatatgtgctattatatataaaatatggtgatatgttcataaaattgcattatatattcatcccattatgtataactccatatatgtatatgtgcagtagaaatgtaggtgtattaatgtcctatgatactcctaagaaattagcagaaatttaatggcttcaaacaacacaaatttattacattactgttctggaggtcagaagttcagaattaatctctgtgggctaaaattaaggtgttagcagaactgtgtctgttttggagactttgaaagagaatgtgtgttattggcatttttagcttccatatatatatgtatatatatacacacacatacatataacatgtatatatgtgtgtatatatatatatatatacgtgtataatggaattatatatcatgtacatatatacatatctaatgtaatatatatcacatatgtaacctgttgtatatgtatattaatgttacatatgtaatatatagtaataacttattttatcaccatatcgaatttgtaattatatgcttaaattttaccacatcaccttcttcctgaaaccaaattcccttgacttaatttgtttgaatagtgccaccatactaataaccactcaagctaaagaaaaacagtaaaccaacaattgcattaaggtctaaaagcctaaaatattcaataaggtaagtaatgtgtcccttgagtggtcaattattgtgacaaatgttaatgctgggaaggaaatgtcgaaaacgttatggtatgatggaaaaacattgcaacaatatgctcctggatttaaatcccagtctagctgcttagtttttgtgcttaccttttacaaaccaaagcactaagcaaacctaaaacattttttaatgcatagcatttctttacttataaacatatgtgtacatgcatacctatgtaaatactgcatgaaaatatctattatttgtcaagaccagtggcctaagagggcacaattacatggctcttgttatcaaggagcccacattctagtgaaggaggaaggtaggtgtattcatttcctatggcactcctaacaaattgccggaaatttaataacttcaagcaacacaaatttattagagttctggaagtcaaaagttcaggattagtctcagtgggctaaaattaaggtgtcagcaggactttgtctgttttggaggctttgcgacagagtctgttttattggcatttttagcttctagaagcattccttgtctcatgtccccatcctccatcttcaaagtcagcagtgtaacatcatctagtgtcaatttctctctccctgtctatctccctctccctctctttctacctctccttctcaccttcctttccctatcctgttccctgtgttgacttccttttaattaggacctttgtgattacattatgccctggtggatgatccagtataatctccccatctcagaatccttaatgtaatcacatctgcaaagtcctttctggtaatatactcacaggtttcagagattagggtgaggacatcttgggggtagcattattcagccttgcatggtaaataaattaaacagtatgggaaaggttgtcacagtaggcaggaaggaaatccaacataaactaggaaaaaggattatgaaatattatcggaacataggttgtctctgctatagattaaataggtagaatttagttagctaataccgagaaagaaagagttcttgagaaagcatagcagcattttcagttaaatgatataagttcaacactgggtagacaatatatatggggattaataaaatattatggttggaaaactggattgagagtagacagtgaatgtccttggatgctatgttttacaatctgagttttaatctagtggtgatgggactgataataataacaataaaaacttaataagaaaaaactgctattggttaaagagggaaataatatgattccacttgtgttttcaaaacattcccaagatgagaggaaggaggagaggagattactggcatcactgtagatcagtaattagaatgaggtgagaccgaggcagatatcaaaacgagccagtgcattaatggagtcactaatgagacctgaacagcccaggcgtagtggctcatgcctataatcccagcactctgggcagctgaggcaggtagatcacgaggtcaagagatcaagaccatgctggccaacatggcgaaaccctgtctctactaaaaacacaaaaattagctgggcatggtagtgcacgcctgtaatcccagctacttgggaggctgaggcaggagaatggcgtgaacctgggaggtggaggctgcagtgagccaagattgtgccacttcactccagcctgggcgacagagcaagactccatctcaaaaaaaaaaaaaaaaaaaaacaaaaaacaaacaaaaaaaaaaagacctgaacaaggacagtgaagatgtgaaataagaacaaatgtagacttgaaagataacagcaaggtgatcgtcttgaagttctcttagataaatagtttaaaaattattattaataatcacattaaaggggaaactttctgtggagcacatattttcaatgtaaatttaagtaaaacagaagaaaataacacatgtagacagcatagttgaatcatactttttagaagtggcaaaacagcagaaaaaaaggtaatacgggaaagaatcatgggtgagagatactggctatttataaatgataaaagatgatgatttttacctgatcattacttcgtactggtcagacaaataaaagcaaaagctctgtctttgaagatgacaaaatattagtccaaaagttcccaactggaaggactatttaaactgtcatctgtagaaaataatttgtgaaagttcgggtttagggaggctataaagacaccattacattgagtttattgttcatagtttgttttatgtactgtaaggacacatttttagtattctcatgagttgttttgtaacttaaaatttctctagagggggatatgatttaatgttctcgagagtaacatcataaaaccacatttggtagtaattttgtatttttaacaatagcagacttcacacaccagtgctcatacagtagaccataaaaatgcagtcttagtaaaaatattctttgcctcaagaactacttagagacatcctttaaacatgggaattgtttttgggcctgtgtttagacataacacaatgatgaattgtgttaaaagtaatcagcacaccagtaatgccttataacgggtctcgtttcagaatcacatacaaaccctgaagaaatggatggctgaagttgatgtttttctgaaggaggaatggcctgcccttggggattcagaaattctaaaaaagcagctgaaacagtgcagagtaagatttttatatgatgcctttaatatgaataattttgtatgaatattatttggttagatcagtgttttacagctggggtggattttgctctcctctccccagtggattttttttaatgtttctagacgtttttgattgtcacagctgggttgggggtggtggttagatgctactggtgtctaataggtagaggagagagatgctgctaaatatcgtacagtccatagaacattcctccagaacaaggaactgcacaatctaaaatgtcactagtgccaatgttgagaaaccctgggttgagtaaatgaggaactgacaaaacattgccttgtactcaacctcatttgataacattattttactataaaatgcagtataatttaaaggtaaagaatcctttgagctacttgttatttcttatgataaattactattcatactgtgttgttctcttcatctataatgcactgtactataatataacacagtatgcattttgaaataatattcattataccattgtcatgcagcaggaagaaaacaatcttgctctttaaggaaatttttttacaatacaagctaaaaaagcaaatccacctcacaaataaccttcacacccattacactgtaaacaatttctgcagtatcctgtgtttgaaaatgaaaatactaacaaagataataaagtatgaagcccatcattttcacacatttttctaaccagaaatattaaatttatttccttttgtttctgatataagtagaatacaaataattccccactggattcatgccataataaccattgaacatttttgcaagactgttaggcagtcatctatatcaatatctctgtatctcagattttaaaagacaaaaatccatatgcaatgccatcagtcccaattttacattttctagctatgtttcatatctaatatgtggcagtaatttttttcagctggcttaaattgatttattttcttagcttttagtcagtgatattcagacaattcagcccagtctaaacagtgtcaatgaaggtgggcagaagataaagaatgaagcagagccagagtttgcttcgagacttgagacagaactcaaagaacttaacactcagtgggatcacatgtgccaacaggtatagacaatctctttcactgtggcttgcctcaacgtacttaactaagatttcctaatgtctcccttcaccgttacttttggttaaggctttgttcctatgtttttgctttaaagcacaattaattctgacaaattaatcttttttctagcatatctaaatattttcatggtatatattttaaatagtacacattcatcttattttgatcctaaaatgactttcttgaacacaactgtcatactaaaaaatgaaatcctattcttagtcattatttccaatccatgttttcttcagaacataaatgtataataataatgggattaagaaaaatttgttacacggagatatttggtacaaaataaaatgcatggctaatatatgtgtatgtagaaataggataaataattataactttcgattaacatttccaagtttggcctcttcgacacatttattatttatttattttattttttgggacagggtctccctctgtcacccaggctggagtgcagtggtgtgaactcggctcactgcagcctcaacctcctgggctcaagcaattctcccatctcagtccccacaagtagctagaagtacaggtgtgtgccaccatgcctggctaattttttgttattttttggtagagacagggtcttgctgtgtttcccaggctggttttgaattcctgggctcaaacaatgctctttccttggcctcccaaaatgctggaattataggtgtgagttaccacacctggctgacatctagttttaaataacaattaagattcagtaaccattaagaatagctgaatttcaaaaaaaaacacacacaaaatgactgtacactcatatttgagtttctcatttttctacagaagaatattttatagatatctctcttatatttaaatattcaattacggatagtaagatatattcaaaaatagtgtatatcaaatacttcttgttcgaaagataaaattttgaactaaagcaatgaatacttttaagttcaccaatacattagtccccgatcatctgcagttttgctttccctggtttcaaatgcttgtggtcaattggaatcctaaaatcggtgagcacagtaaaataagatattttgagagggagaagaagagagataacttgttctattttattagttgttaatctcttactatgcctaatttataaattaaattttataggtatgtatgagtaggaaaaaatctagtgtatatagggttaggtatcatctatggtttcaggcatctattggaggtcttggtatgaacatatcttccaaagatacaagggaactactgtacctttttggaaattaataaggggtttcaatttacgtgttagaggcagttggtctttggttactgctaagtaaactttcaaaatagaaaagaagtaatgtcaaaaggcaaaagctacatttgaaaatgaaaaaaaaaattagaaaagtcaagggaaatcactcagctaatacaatcactgacaagtgttcattggttctgttaattcacagatgagctgtccctgggtcagctagctcacattcttctcctgaagtaagtcagtgctagaagagttgtttaggaaaaaaaaaaaatattacttaaataatagattataccattgatgttttcctggaaggccagtgtgaaaggtatttgttttttgtttgttgaatgttcttaatggatgaataaaaagaacatcaccaatttatgtagagcaaggggaaaacatcagccaaaaaaaaaaagtataaaaccaacaatattactaaaacctcaaggtttttacattttacaggagtacaatttgtaaaggctctctaaaaatgtctttgcttaagaccttatgtctgttatatgtactaagaatttgttgttcaagagatatattttaaacacactcatctgttgcatagcaaaaaagctatagatccaagctatgttctgatctccattttctaatcttagaatattatatgtatctgtgcttttcctacaagtatcactctggccatgttctgactttgtagccaaatgagttaggttgtaaaaggaaggaacaatggcgctcaaggagaagaagaagacgatgcggtaaaaacaaggaagccatatgtgaatattgttaccaattcagcattccagagagaataatggaaatgaagtgtaaatctatgcattacagaaatatctacagacaaaataagtgtgtgatacactcttttgggttaaagataattccttttttgtcaccagatgccaatgtctgcgaaaacataaataatttgaaacaaaattgtccaaatatctgatacatttgaagatgctttcacatcccatgatctaattttgggtatataaaatggttattattttaaattttaaagggtatgtatataagtttaaaaatctagattctagctatttctaaaaaaatgatcagatataagtgagggaataaaatagacattgtagttaccttcacggagataatagtttagtggtgaaaatggaaagtaaataggttaacacattatcacaacaatgtcttgtttgaagtcttgcttacactctgaatgtagcaataagaaccctttaaatgagagtgacaggagcaggaaaactactttctattgggtagtcagtagagtgttttctgaagaggcgaaattaaagctgatacccgagtagtaggaacttgacaatttgttgtgtcaaggaattctgccagaaaatgaagtggagaaaacatctgaggcaagagagggcttagcatgtttgaggagctcaaaggaagccaggagaaaaagagtgggaaaatgagtcagaaaggaatatggaagccacagtgatgatttagtcattatgtcaagtactttggaaagtcatctgacttttaagcataggagtggcatcatttcatttcatttaaaatggttgttttaagtttgctgcatattcctattagaagaagaataaatcaaaagggctgaagtggaagcaggtagggattgcaattgtccaggtagaaaaaaaaaacaggcaggaaaaaggggatatttgtggatattgtagttttctgaggaacctccatgctgttctctacagtgactgtaccatttatattcccactaacagtgtagtgtagttcctttttatctgcatccgtgccaacaattattttttgtctttttggcaatatacatcctagctggggtgaggtgatacctcattgtggttttggtttgcatttatttgatgattaccgatgtggaatttttttttcatatattaattggccatttttttcttcttttggaaataactgttcagattatttgcccatttttgaatcccatcacatccacatatgatatgatgttttatatcataaaatcgttatttttctttttatgatatctgagtttctagcttctgcacagcaaaggaaacagtaaacagaatgaaaagacaatccacagaatgggaaaaaatatttgcaaactactcatccaacagaggattagtatcctcattacatttttgatgaggactttcacacttacatctacccagaagtattattcctatcctaacatgacacattcctttattctttttaacagatcccattagatctggcagtacttgctgaaggagagtgtttgttgatagtctagaggaagaatgagggaagaatcaaagtgttttcagatatatttctgttatgagctacattgtaggtcattgtgattttaaagaaagagtgggtactaagagaagaacaaaatggaatagcttactagagtgactagcggttccatcttagccatatttatttcggagaaaaagacaatcagacatgtatctggaagtcaagtacacttttcaaactgggcatataaacgaggtacataaaaataaagataacatgtatataagatactgtttcttgcctattgagaagatttccccatgctcccatccctaaaatgcttggtcaaattggataattcgtaaactcttagagatggaagagaatctatttttgtttaaaccactttgttgaggtatgactgacataccaaaagctgtacatatttaatttatacaacttgattagtttggggataagcgtatacccatgagacttattaccacattcaagatgataaacttacctatcacctccaaaagtttccttctgccccttaatttatttattttttttgttttgtgataagagctcctaagatctatcctcttggaatatttttaacaatacagtatttttaactataggcccaatgttgtacagtagatctgcagagctaattcatcttgcataactgaagctttgtatcctttgggcatcattttgccattttcccctctctcagcctttggaaaccactattctactctctagttctgtgagtttgactattttagattctagggaatggaaggaaatattcacaaatcatatgtctggcaaatgattaatatccaaaatatataaggaacttctaaaattcaatagcaaaaataaaactgaaaaataacctgattaaaaatgagcacaggacttgaatagtcatttctctaaagaatacgtagaaatgaccaacaggtatatgaaaaggtgcatcactaatcatctgaaaaatgcagttaaaagccacaagaacctcttcatacctgttagggtggctattatcagaacaaaacaaagcaaaagatactaagtgttggcaagaatgtggagaaaagggaattcttttatggtgttggttggaatgtaaattggtgcagccatttgggagaacagtttggaggttcctcaaaaaattacaaatagaattcccatttgattcaccaatcccgcttctggatatatatccaaaggaaataaaatcaggatctcaaggaggtatctgcacccctatgtttacagcagcaatatttacaatagccaagacatggaaacaatctaaatgtatattgtcaaataaataaaacatggtatatgcatataacggaatattatgtagctttaaaaaagaaaattcttccatttgcagcagcatagatgaacttggaggatagtatgctaagtgaaataaaccagacacacgcggtcaaatactggagaatattttttttgtggatggaaaggcacagtgtgtaagaccagaagctctgagatcagatcgcctgggtttaagtctatccacatcataaactgcctgtgtgattctagaaaagttgtttaacctttttgtgcttgagtctcccaatctttaaaatgtgatgatattaatacataattcataagtatataataattaaatgaattcatcttttcaaggtgtatagagcctcatctaacctagattaatcactgtacatgtttgttagatagaaaacaaatagaaacctacatatatagaattataaaacatgtatactttctaagtaaataatatatggttatatattttaattattagtggctttaaatttatagtaaatagttatcaataaatgggatttagaggttacgtggatgtctttctgccagcttgcagatcattgtctttctctgggtcagtatactctttgggtgtagtgatccccagatctctttcgtcagatctctaacagtctgtttttccatctttctgcaaaaaactagcttcttgttttaccgagaaaatataagcaatcagaatagaagttgcagtactcccactgacctgcatataagctcacagactctactttccctttgtttacatagatgaactttctgtgcttttgtctaaggccagcttttccacttacgtacctggatccctttcccttgtctctgcacaaggacattgtaacagctaatgaacagccctctacctcctacatcttctccacgctacatcattcccatcattcccatcagtagagaattattctgtaatatctcctgtcatttaaaagaatcctcaattggacaacaatctctctagcaacctctccattcccgtttccctttacagacattcctttctctccatttcactccttcccttctctcttgatgccaattaagagagctaatcaaactgttatcctcactattctattaaagcagattttgtcagggtcatcagtgaattcgtattactaaatcgctaaattcagttggcttctgtgtcatcattctttcttaattatctcttagttttccctgaccactgtcaatatccttggtggttctattgccctgaccactaaatttgaaagtgttccagggctcagtctgtggactccttttttttttccccctattaccacccactctccgggtcaacttatcaagctccatagttttaaatgtaatctgtaagttgttcctgctgtaagttttttttttttttttttttaacaatctggaccctttctaatgatcctagacctgcatacccatttgcccactcaacacctccacatcaattaataataggcatattaaatctaacatgttaaaacaaaattcctgatgtataccccagtctactaccctagaaatttgcctgttattacaaatggcacctccatctttccacttattcaagccaaatcccacgagattttcttgtctcctatatttctcttacagccgaacatcaaatctatcaccaaatgctgtcgtttttgccttcaaaatttccaggatccaacaatatctcaccatacttgagcacgtgcacacacacacacacatacacacacacacacacacacacacacacacacacacacaaagtatgtatgtgaatgtatagtttttactagaagtcttggctgaattccattagtccctctaatatttttgtagcttcaccaactgccttaaaagattataacagagcagagtttctaagtagaaatttagcagcaggatttcttaatttataaaatagcaaaaatagcagcatgttttcttaagtttattataggttcattgactgcacaaaataacatttataccttttctagtacaattgcaagacatattgttctagatgtgttagggtgaaacatttatttacattgtagtagatcaagtactacatttacctaggtaagtaaagaacctaaaatgaagtattatctatattaggctcaaaatggttgtaaattataaggaaaatcaatgcgatagtgattctacacatatttactattgggcaaagtaccatgaacacttcattttactaaaactgtgcattatatattaatactatgaaaactctgttacttaaaatgtataatgttgtttcaaccagagagaagaataccatcttttgaatagagttactttttaaagtaaaagcactatgtataatgattgtaatactatagagtgccttgtaacaaggtgtatgattttcttttagatgttttaagttttgcatttttctggttaatgagtaatggagtccattgtagaaagttttagttttcaaaaatgcgtgaggctttaaatagcagatgttttctataaccacagacagactcttttgcaacttgcattttacacgtaaaactttatattgagccacttttcatttcagtaaagatgtatttgtgatgcacagtatcccatagtatatatatgtcataatttaatctctcatgaaagcacctttgggtttgttttcaagatgtttggtctttaaagctgaattaaatattgtacatgttagtctctacactttggttggcatgattcactctcaaaaaatggagcagttgactcagattcgtggacattaacatttttatatgttttgccatcttactatctaaaaggttgtattatgttggatatttccctcaacaagtataaaaactttgattttcccacatccctgcccaaaatgggctctttattaattattatttttccctgtcttaacatgtgaaaatgcattaattcacttcgatttgcaatcatttaactataaatggtattagaacatcttttatatacatgtattgccatatattatcttctttgtgaattgccaaactacgttttatgcacttttcgttttttctttttaatttatgagagtttctgtagatacatgattatgaagttcttagaatatttaaaatagtaaaacattatgaaagaacacaaagaataactatttctatgtatgccaataaaattacttttccaactgaaacatattattttaaaaagccttgtttttctccattcacagaaaagcattgtcacacaaacagctgaattatcatcatcgggcaatacgttcattttattaagtatgccaaataaacagacatgtcttattttcacacttatgggaaattgagtgtatctgatccccatgagttattttcttatgcatataagctttttacttctttatcattactatctaagctttctgttatttacatactgatgaaataatataataataatgtttcatcactgtcaataatcgtgttttgtttgtttgttttgtggaaggtctatgccagaaaggaggccttgaagggaggtttggagaaaactgtaagcctccagaaagatctatcagagatgcacgaatggatgacacaagctgaagaagagtatcttgagagagattttgaatataaaactccagatgaattacagaaagcagttgaagagatgaaggtaaaaaaaaaaaaagaaaaactaagtaaaacaaaggaaataaatggaaaaagaaagaaatgcaacaatgcttgaagttgtatacagtctgctctttcctggttctaagagaagaggttgatttttaattaataattttaatttagcttcaagtttaatatacattttaacaaccttaaactgtttaattttaatgcattgtggtcaattatgaaaattgaaaatcacaatttgaaacaattttcccttgaaatcatgtagtattaagagagcagaatcaactcatttcattaactgtctgtagctgatgtaaatgtacgttgaaactgtgcaaaagtattcttgaaaagacaaatttataatgtagtcaacaaactgtgttaatttggtagtttgaaggcatttctgagaatttggaaacactaaatatttgaacccgtagcctttaatatggatagaaaggactgagtttacatgtacttttcttgaaacaataggacaaaatataacattgacttattacgaaggaaactggtatgtagtatgtagtatggatttggaggtgaagcctggacttgaacctacatagtggcatttcgtatggccttgggcaacaatataatagtcaatataatcctctgttttatcatgtttatatcatcatacttcctcacttgaatgtatgaactgttgattgtaactaccatgtgagtaaattgcctaactcagagttggtgctcaattagtagctataatcataattattatttttatgtgctagcaagaacttagagaatgacttgaaatattaatactgtagatctttttttggttcaaggattgtgacaaggaaaaatcaatgtggagccagatacttgagtttaaaacttagttcggccccatgccaactgtataaattggggtgagttacatgagcttactgagccaaattccttcgtttgtgaactgggtatcagaatgtctgctttcagaatcattagagggatgaaatatgaaatttctaacacaatgcctagcacagtataaatgaccatgactcattatttattattttaattgtgaaagggccacatggtaaaaaattatataattaaatggtaattcagaaatatctattatagttaatagcagaaagtaactcacatgaaaactcagatgtttaaatatcgaatctgtcatacggctttagtcaaatgttgaaagtaaatatctaatatactccataaatatgtataaatattatgtgtgtataaaactataatgaagaaaaaattagtataatcatttctagagtattaaaaacacagaattattctaatctagcaatagcatatttatcaactaaaacttattgcatacttactgtgtgccaaacaccctctggctactgaatatagagggtggtgagcaagaccactgccttggaatttacattctagtgttctagcgtgtggtgaggagcaggcaataaatggaaaaataaatgaaatcatgataatttgcctagaagtaaacatggattttgaaatcaagaatgaataatgttcaggcaggatttgagggtggtaggatgctattttagaaaaacttgacttatagagcatttatgaagaattgtatgtaatatgagagaactgaatcataaggaaaagccaaccacttaaaaaaatctttatggaaacacattctattcagagagcatagcttctgcaaagaccctgaagctaattgggaagagaaagaaatctgcctgaaggaaggaaaatgggataaaattacctcagataagtcttaggaggtgggcaaatatctgttaacaaacgggttttgttagagtatcacagtttttattctaaatggacaagaaaaaccattggagtatttcaaaagaccaaaataatttaaaatttgactttggggaggtcacccctgaggaaaactttatcagaatgtgagagctagaaggtactttgaaacttgtgtaattcacacttctctctctgcttatcagaaaactgcaattcccagataggtcaaatgatttagccatagtcacagactttatttgtggtagagcccacaggattgaaggtattttattctatttcatctcttttttcctttcctttcctttcctttcctttcctttcctttcctttcctttcctttcctttcctttcctttcctttcctttcctttccctttccctttccctttccctttccctttccctttcctttcccttccctttccctttccctttccctttccctttccctttccctttccctttccctttccctttcactttcactttcactttcactttcactttccctttccttttcctttcctttcttttccattgtgtgtcactcatatggccttttctcttgtatctcaattcctttctcactgcgtctatttatatatggccactacctcagatccgtaagtagatactatagagtcatttgtgttcagctgctctgattatccctgggttcctttggttcagtgcctcttctggccctcttccctctccctatgagcgatttgcctatgtcaccaacaacccagtcagatctctcttattttcctgtgctctagagtaaactgtctcaaatttttaaaatttgaaaaccatccttgaaatgagtgttccaacaaatttgtctacattgattgacatgttttgataattggtctagctacaaaattggtttagtatgggggtgatagtaaaaagaggtaaactctggaagcctctggcaacaaccactggaagagttggcaggaagatttcatttcttgagttttcagcctgctactcaagacagtttctttaaggcaacttcactacctggaggttagcaatagtaccttgtccagacttctacctgtgctcatttgatagctaatttttctttattgtcagaagatactaacagacctattttgacatctctccctgatactcaaagaagaaatagagacccccccttctgtttatgttctttcctgtgttttacctgaaaatggaagtgctgttttaataacttatttttcccctgaaaaggaaagtttttttgacataaaagaacccagggtacagtttgataaacaacctctgactttaaaacttttatggagatcagcaatcactatatggtaaaactttatactaaaaccctttgaaaaacactctggaaagttattaactggttttatttttttttaatttttactctattataactctagtactagtgcttaccagaacttacacataaagtgagaatagtaaatacacaaataaatttgtataatcactacagcagtgattcctgcatctgaatggacatcagaatcacctggaagtcttgtttaatacacagagtgctgggccctgaccccagaatttctgattcagtgagtcttgggtgaggcctgtagtttttcatttttaacaagtttgagtttgataccaaagaacaagttgcagagtgattccaagggtgctcactttaagaagcacgggtgtgaaatcctagcaatgaaagatggcagagcatatcatagttagattcatggaaagaaacaagagccaccgtttttatgaggatttgtatagaaactgtaccagtcatttagctttctaccttttctcctagtagagaaattcatcatcatcttctttcctcatatgtacctggattaataaattttgctgtttgttcttcgaacctttcccaagatctgagcctcttattaaaccaagaatatatgaagtctaaaaaccatggaaagaagtgttcttcattctacatttttatatagttgcttgggttatttataatgagcataaattgtaattttattcattagactgactacagcatgctccttcttcagctcatggaacatttgagacccgcttaacagaaactatgagaaagagaggatataactctgaggatgatttccttaaactctctgaacctcagttttctaatgtccaatatagaggtaacaaaacacatccgagaaggtttgggtaaagatctaatgaggtagcacttatgacatggctggcacagaacacagtagcacatattaaatgatgaatggtaatcaaacttgttgattatactataattactaaagtcaaaatgcaatttgtgtaaaaacaatctctatgctcagtgatgccaaaaagctgatttatttagaatattgaactaaagatttcaatcaattaaaatcggtgaagttaagcattctatagacaaaacaatttgcattttctgacataatgcatacttttaaggaattgtgggactaaatccaaaggagtagggtgattatgctgacacatacaaaggcattttatagctgaccttatccatatcctgccaataagcccttaccttaaccaccgcattgtatgcaggcccaacttctacattatagaacctgagttcctttacttgagggctttctgtggccactgaatcccacttttgcacttgtgtggtaggcttgcaagtactgggaaattaacatttccccaacagcctttaacaattagggaagatgatacagaaataataccccaatttcttcacccctgaatgggataacccgcaggcatatatttctcagggctttctaacaggattaaactctagtcattaacagtgtttgctgggattaataagtatgcccatatggatgtctcttccctttcttgtctcaattccccattcagctaccagaatttcttttacatggcacacataaataaactacttatatttgaaagctaatgtcaggtttgacccctggaggaacacagactaaagatacagtgtgtatgtgtgtgtgtttctaaaatacatgtacgcatttgaagttaaggagtgtaaatgtctcccaaccgaagaccaccaccaactctcttgtagctgaacaagttgggttcattattttttgcaatgagggagaatacacaacatggaggccagggggtgcgtgtggatgaaaaaaaaaaaaaacattgtaggatttgtgcttgtgttaggggatttgagggagggtttaaaagctttactttggattgcttgtcattagtgtgtagggatagctatatgggtatcgtatcttgtccagaaggagagaagaccagaatgaggctaaagttgcaattaataaagaaacggcgttcgttcatattaaccaggataggagagtgttgggcgttttgtggtttgggtaatgttgatgtttttgtctggattcagacatgattatggaatgatcttgtcatggtcttgatccattatggaaacaaagtggccttttccaatgttgaaattctgtgaaacagtttattttccacttgagaagaccaaggcatagctgggtgtcaggccagcttctgatatcagcagctccttttttggtttctctttctctcatgtgttttcaattctcgaacgaaactttcttttatcaaaatatgttcctaaatatagcatcaaggggacctttctatgttaagtatcctttaacttaaataatgatatttgtgatggtttcaatattattcatccaagtaatttataagtgatttcaattctagactgccaaatattttttaacctagttaatattgaaatatttgtttcttgccttttccaaacaattgtatttatatcaatgtgtatatatttgaccacaaatccatacctccatgcagactacttttcagtctattcttgttacagatctgttgtattcttataataaattatttctttaactttccaatttcaactaaacttaaatttatggaagagactggagttcatattagatttatttttgtaattctcattctaactgggatgttgtgagaaagaaattatatgattcatagaaatgcattttggatgtaaagttattttcatgctattaagagagcattctttatttttcagagagctaaagaagaggcccaacaaaaagaagcgaaagtgaaactccttactgagtctgtaaatagtgtcatagctcaagctccacctgtagcacaagaggccttaaaaaaggaacttgaaactctaaccaccaactaccagtggctctgcactaggctgaatgggaaatgcaagactttggaagtcagttgcttttcttggtctttgtcaatgatatgtcaatacatggtcatatgtgaggcatagtggttaagaacatggataccagtgcaaaacaactttggcttgaattcctcattcaggcacttataagttgtatgactttgggccatttgcttaacttgtgtaaacctgttttcaatctgtcaactagacataatacataattcataagttgttgagaaaattaaatgagctattctctttaaactacttagcctagtactcaatatatgtgagtagctatgcttctaattctcattactattattaggtcataaaatcctataaattttctccagatttatagacaatgatctttattttttcttatttttgtatgtacataaacttatttaagtatctttggggaaaagcattctgtagagaagtatgtttttactacaattgtctttagtaattgccgtgccccatagagttctttgttagacatgttacctaaccagctctatattttttgatggtttgcattatatttatgtattatcacaacttctgctttaacttttatggatgggccttactgtctagattatgcttatctgaatttagataaagaaagcaggtgcctcaaatgatggccatgtaattgcatcaaaaataagctatgacctttcttatgaaaatactgtgccaaggggcacaaaactttatccactacaaatgctgatgctgccagacattgcacatgagttggactttaagcccccttccctcacacagactgagttattttggtgaatatggttaataaagtgttcaggtacctctttacttttgaaaaacattatttagtttgcttcctatgttgagggtttgatatttaaagaaagatacgattcagatcaataataaagtacacctttaaaaatattttaaaatgtatttgtagctaaagtaccccatatattcccaatacagtattatcattttccaattgtaaaatgtgatccgagtttctccattatcagttctaagctcttctttactcatccttattcttttcttttaaatgcaattcactcctcagactcttgaaaagtgccttctatatgtcaggaaatattacagtttctgaggatataatgacgtatcttatgtatcagtgttatgtgagtgctatataaaatataacaaagaatgggaagggaagggatctgatggcactgtacatgtctcaagaaaaccacaattaattcactaacatgttacaatagggagggactttttgtacccaggaaatgctttctgacaatgtttaaataaaacacctactattactttcttatgttcttaatgtccttaaataagcatcattgttccctattattcatgttgttcatttaaatgatactccgtgattcattagaaatttatattggagtacattttccgaagggattttcttaagttttcgtattaataacaaacttttcaagaccaattattggattatttttccatttccttctcatgtataataacatttctaacattccctattcatattgaagttatcaaattattgagttccattttagtcctttttcactggtttggaatatgtactttattttatcttataaatatttctctatacctctctaacaataatatggtggaaacattagcatagtttaactctgaacctacctcttccgttttccgcgttattgttgcctcatatttcattttcaccttatttcccccaaattagtccatataattgctgttgctgctgctgttgttttaactatttcatataatatttatttagatttaccgatgctattttcccagtttttgtgatcagttttgccttttgttcttccctttgcttctgtgttcagtttctttcttgctctttccttgagtgtgagtagcaaatgtgttcagattttacatattgaaaatgcctttattttgccctgagtattggataatgatgcagttgagcaggaaattatgtaaggacaggtttttttttttcctacaacactgaaaatattatttgtcttttgaaattttttgcctttaggaaatctgctgtcaagttattgtttctttatcattttctctggtacctttaaattttctcttcgtcctgtctgctctgcagtttcaccctattttgtcttctacagtttcactcaactttgtctgtgtgtaaatttgctttcatttatactttgtcacctggtgtgttaattagaacagatacgttatttctttagtggttctgcattgtctttgtgaagattttctttttcccaatctcttcattccttcctaagggaaaactttcttagagctattaagactatccccttcttatattccagttactggtttccctttaatattttctatattcttatctctatctgctcaattttggatacttttctaaaatctgtcttccaactctcaaattctcgcttcagctgcctgtggcgtaatttatccttcaatagagaaatagtctcatctttgtctgtatatatatttatctctctacatttatgtatgtgtgtttatattttttcaaaaaacatattttccatttctcaatattttattgagttgtttcacaaatctgttctttgttatggttttcttcttttttgtgattaattctatgtattcctttaaacaacttaaacagataccatctgtttgactgaaatgtttcaacttaatgagtaataaacatgacaccgtcttatttttccaataactacacccaactctgtcaaatttcaccttctgcctggtagttggcttctttaacaatatttctctgggatctcattactttttattcacttttagttattaaaatgtactctaatttaaatttaaatatcataacttaatcaaatatttcacaagtttagattaatctgttgcttcagcaatttatacagacgcaggagtgagaataaatggtctcacagtctcctcctccatcccagtttctggatacagatctactgtcgatataagggagggtgaagagggaaaaatactctcttcatgtgaaagtcctttttttgctgctcacaactgctgttcccttttgttaaaacccacacacatctataatgcctagtctgttgtccctcttctatatattatcaccactgacctggctcgttctctatagacttgattcgctctgttgaggatccagattggccttattcatatgagctttgaaccccccaaaaaagatctcctaggcttttatagtacctcgtagtgtttaacaagaatttcaagctgacgcttgtcaacagctttacacaaactgctcttgaatattatgtctttttaaccaatgctttagtgatgccctggagtctaatttacctaccatatctcaactcagagcctatgggcactggaagtacctatactccgtacctttcaggaatgagaagtttgaaagagttgtttttgattccttcttggccataccaacagctcaacaggaaatgaataccaaccaccccttcctgaatatatccacccagtagatgagtggttttgttttagatcctgtaaataaaatgattcagatgagtttaccctacctatccccataaaagggtgagaaagaagaattgcctaactattcaaactctcttcacctcactcccctcaagtctccgtcagctctctctgtttaaaccagggcttgtgaaaacaagaaagagatgatctcccaaaatgaaatgtaggcaaccaagccctttttcttaggtgtgaattccacttgccagtctcaagcaaataaactctatgggaaacatacaccatgaggctaggcatatttattgtacagttctccaaaattgttctattatctttatgtcataaggtatggattctaccatttgttacaactaatgactccctctaatggaagtgaatttccccatgtggctagtaaggtttttgtttgtttatttgtttatttgcgagctcatctataataggaattgcctttactggaatttttgtctttttttttctctgggctattgagtttttgtattgttgccatcaggattgtagagattttatgctctgccctcatgtgtgatacaagcttaagtttccgtttgttatgggtggatctttatttttcagcccaaaatcccccaacaatagtttccttgctaaatcataatattccaatggctagggatgttctacttcttccttacagggtggatggcacactgcttcattctttcccatttccctggcttgcctcatttcccatctcaagttagtgttaaatgccccagctttgatgtcgtataccctgttctgatacgccagtatttttataagcttgattttccactttctactttcatttccctctttttctttctcacacctgaggttctatatacatgttttacagatcagctatgaattaaaaatgtttcctttgtattttaacatgtattttggtataactgaagcaggatatgttgggagttacctcatcagctccatctactattttgaacagaagtttagttttttatttgtactttccttcaaagccactttggattctgtgatttcaaagtaattttaagatccaaactgttaagcttaacagttattctaagtggcttttagctccaattcgggcttcaagactatattttattttgcaaaggtgacctgtaaagctggtacattcagcctctccagctgtgtccttcagatgcattgaggacagaagaagctatccattctgacagttaaatcagcaaggtagttcattacctcaatctgcaccaaagttaataagacacattaccaatcacgtctccttgtcttcaaagctctaaggtaccctcgggtatttaagaagatatttatattttcccactgggatctttgcccagaatgaagacagcctgtagtccagcaggagctggaaatgacccagattttagatttctatcaccttttaaagcaaaacacttaatttcactttttgcaataaactgtacataagatatcaagcaggtatgaaaggttggtacgtttgccaagcaggtgagactgatacttttcatcagatagagatcgaatactctgtgtcattctaagggctatgaacatagagaactttgggaaatctgattaattttttagatccttctgaaataaatcttcctttcaagcctttaattttggtggtagtgaggcgggggcaggtggtagtaagtggtgatgattgctgcattgtgtttactgtacttataggttcattcaacagttacaaagctaacagaaaatgaccgttgttacattcttatcctctctcgcatcttcctatcttttccccaatagacataatcaccatctagaaagctacctttgttattcctttgtttaaaaaaaatccacacacatatgagtgaaaaaacaattgtgcttaatttcagtattacagtaatggtaaactataatatagtttttttagggctttgtctttcacccaacatatttgtgtctgagattcattcttatggttctttttgatgagatttttcattgtcacgtctgtattctctgtttaaagatgacggtatatttttccattctccttgcagtggacattatttccttttttttgattactacaaaaagggctgaaatgatcattgttgtaacagtcttgttatccatgttaaacagtttctctgaggatgcacatatcaaaaagtggagttgttgtcttgatgggtatgtgaatgttcaccttattgagaataacaaattgttttctgaaatggccatttcagtacacacacccaccaacaataaatacaaatttttgttcatgtatatcttctctcacacgtggaattgtcaaacttctcatttgtgtcaatcaacatggtatctcattgtaatcctggcctacatgtccttgattactaatgagattgaacatatcttcatgtttaatgtatatacatatttctctttaagattttggttcaggttttcttttcattatcgattgggttattcatcttctatttgacttgctggcatttttcatattcttatgtgttacagatgttgcagttgttttcttctattttgagtctgtttttcaattacttgatggtgtcctttgatgaatagaaggtcctaattttaatgtagtcgaatgtattcatctcttttttcttacggtcagttttttacgagatgtcttacttaagatattcttctctatgccaaagtcagaaatattttcttctatattttcttgtagaaattttaaagttctgcttttttatgagtacttctgtgtataaatcagtttcataatacaaattaatggccatttaaaataatcaaacctttgaattagtggtaatatttccgataatatacctcaaggaaataataagaatgtggaaaaatagtccatattcacgatgatgtttaccataaatttataatagcaaacaaaactaaaagtagtctatctaaaaaaaggaaattgctaaactaagatagagccactttaaagaagtcttagattttcattaaaaatatgtcttcttagtaatacagaaaatggtatgatataatgtttagtgaaaagagagctatagttaaactcacttaaattttaactatcaaattatatatgataaatttcagaggaggtcacagaatactggtaacagtgatgtgtgagggagttagatttacatatgcatttttacatatgcttttatttttctgtttcccagactgcaatgttggtgcttatttttattttaaaaagtaaattactgtcttttgaatttattcattattcatgtaataaaatgttttcttaatgacttttgattgtagaggtattagatgatgaaactgtctagctgcattttgaattacctgctacaaagtaaaggtgaaaaatacaaagtgttatattttcagaagttttaataatgaaatggcaaaatttcacatttacttttctaccataatatttaatctgtgatatatatttctttcttaggaagtttgggcatgttggcatgagttattgtcatacttggagaaagcaaacaagtggctaaatgaagtagaatttaaacttaaaaccactgaaaacattcctggcggagctgaggaaatctctgaggtgctagatgtaagttgtaaattaagccaaatgatgataatttatatgcagtattaaaagaggtcaagtaccaaatagaagacaaatccaaagaaaacaacccaagagagtataattactatgttatcactcagcactggtactttggataaagcctttgttccccctaataaccttctaggtcacaagattttgcaaagggtttaaatggcttctcacagaggaaatttgcctttattatatcactaagttctacatagatgcttcacctaattaaatgtaccacaaacctgcaaagacagtgtgaataaacaaactcactgctttagggctaatcgggatgataatatgaaatattatttccagtttaaaagctgcacgtattgaattggaacctattttatacttacttaaaatcacaaatttacaccttacggaatgttttgagttattaaatggatatgctttaatattggaaatatatctttaaagtattcataaaatgtaagtacatttttaagttttactttggagactttcaataattaaatgagtttgcatttataaacttgactttaacttctgacatttaatcattcaagctctatgcattttagtgtacttttgacttatctatatgtaatgaatatgttgttttagaatatgtaatatatgtacgtaaagctataagtagtatagcccctctgtaaatctataaaataaggagcataaattattcaagatgtgaagaaaatgtaaggtatttctttagacagaatagaatttgtaatcctagaacatcagagtagacacctatagatcattttatccaacttcctaattttcaaaaggaaattataaaacctgaaaagatattaaagtacaatgaagtagatctccagtggactttaattttggctctatctgactatgactataaatttgtcgtattcagagaagttaattgaccaaacatttcttgtgaatcagcaatgtgttacatgttctagaaaagttgcagcaaatttacagcacattaataaaaggacagtggccagaacagaagataggatgatgctgttagcctatgaaattgtcaaatcgtacatggagcaccatgctaaattcttgctctcacagtttcagtgatgtgctgaaaaactagggcatgttcacaaaggaatgttaaggaaagagagaaaatttgaagccataatgaagagcatttagaaaagatggggaaacaaaacttaccattactatttactattttagacgaggccctcacaatgcccacaacacagacaagcagggaggaggaaaattgcgagtgctcttatcttttatttctatgttgtggtcataatttcaaattgttcctaattcagataatggagccaataaatgaaattccacagtgaaaaaataaataaatacatacataaaattggctctttggtagtgttgctgatgcttatccaggaggacattttgagtgaaaagggctagatcaccacgtatcaaggatagaaaaactgcacgacttctaggttttcttgcaactcaagatatttataactgatcccttaattttgctttgttgcttttcatccacctttaaaaaaatttaacaaggtatatactttgttaagacttataaaataatgtatccattaaaattatttatatccattttgcaaataaatatttacaaaattaagatttgttagaagtaataaggaatataaattattaggaaaattattaacaatcacattgttctactcaaaaatttgatggcttttaaagtattttacaggttatagtgattttttttaatataaatgtatttaggaagtctctttattttcttgaaacttaataggacaatgtattgagtttgctcaaaattcaagaaaaatacataaacaggaaaaattacaaatatgtattggaagattttcatttttttaaaacaaggaaaacagaagatttaataaatttgtgagaacatatgcccatcacttattttatagatatgtttgaggtccagtaagatgaaattgaatcccttgttttctggcatgcctatgacactgagattcactttcatcatattatctagccaggcaactttgtcaattttgagcagtataggagatgggtattattgggatgtacgtaacagagaatcagacaacggtttaagctcacaaaatgatcttttctcaccacgaaaagaatagtgaagggaggttactcagggttgaggatggttcagccatattatgaggcgagtaggcactctctgctctctcttcctgagcatgaaggacctcacactcaaagtcattgcctcccagtgcaaagatgattgttatacctccaggccatgtatgtgcaaaaaagtaggaagggcaaaaggattcttcttgagagagtactctttttcagaattgtgtcacgtggacaccactagctatcagagaagttgagaaatttagtgttttacctcttctggttttagagttaggggacgtcaaggaaaaaggtggttgtgaatcaagttttaagttctcagtccgcaacactgtcataatcccatgaagattcatatagaatgacatcctattttttgaagcaaaaatgctccttggtgtttttaatcccaattaaaatttgctttaaattgattatgacttaattatatgtaaatcagaagatactgagcatttgctgataatccaatgtatttagaaaaaaaaggagaaatagtaattattgcaaatgtgtttcagtcacttgaaaatttgatgcgacattcagaggataacccaaatcagattcgcatattggcacagaccctaacagatggcggagtcatggatgagctaatcaatgaggaacttgagacatttaattctcgttggagggaactacatgaagaggtatgaagataagtgaaaaatctctttaatctaatttgcattaatgtatagcagatacaggcctctcagataaaatgagcaatagtttaaatattagctcagctttcaggtttcagagacaatccaatgccagacactgggtaaattctttacatgtgtattatagcatgtgatttcacaaaaacattgtaagttaggattcttaaaaggcaactgagacatcccaagaaggttactctgaccacagagttcttttccttactcaagatagaccagtatgtgtgggtatcctttctctctcgctgtctcattttattcctctccctccattccacacacatttgttatgtcacatgtaatctgctaataatacatgcaattctgttagtaccccatattatttattcttcataaataacactacatttcttatagataaattttcatatatcacacatggtgtgatttttcaaatcaaaactaaaacaaaatagcaaatttctcctagtcagtgttttgcatactatctcctaagaatggattatttgtcaagaagaaaacccattttataatgatgtttagttttatattcacttactgagtacatctactacatgtgagatatggttctatggtttgatgagtaggaaaaatttgctaaccttcataacttaaaaacattggttagttaaggaagagttactgatttcctagaatgtgcaagacataaaaacaaataatataacgtatgaagagaaaaaagagaataagggggggtagtaactagggtagtatgcatgaaaccattgactaatgacttattgaatagtcaatgtcggggaccttttgacatgcttacagattgaaaaggaacgccttgagtaggaaaacctcttctctatccaattctgaagagaagtatgtgagggtagggcagatatctgcaaatgtaccagcagcacctccagtcttgaatcctgggtggcatatccatattttatccaaatcaacataaggaattggggattggaaaaggggaattccaaacaatctctggtccttcatcattgttgcactattgctggatctgagtcaaatagatattgctatgtggcaagtaaattgaagatcatttcaatgtgggttgtgatatggaattggaatgtgtttttatttctatttgaatatcagtgtcaggtaggagacagcagttgcatcaaaaaattaaaagtcattgtgaaactgaccttggcttagctgtgaaaagactcaaatttttttttttttaaagacagggtcttgctctgtccctgagactggagtgcagtggcatgatcgtggctcactgtagcctcgacctccctgggctcaggtgatcttcccacctcagcctcctgagtagctgggactacaggtgcatgctgccactcccggttatttgtgtgtgtgtgtgtggaaatgttgttttgccatgttgtccaggctggtcttgaactcccgggctcaagctatccacttgccttggcctcccaaagtgctgggagatacacctggccaagatccaacttcagtgtttgacatttttcagtactcatctattctgtccttaggaatagcttactctctaacttgatcttggtattaactctattaatgtaattatattgcaatcctttattaacacaaaactacttataaccttctattttaaaggtttttggtataaaccctgacatttcccccaaagaaaaaataattcatttcagcaacataccctgattcaacacgtattatcttattttctggactgagtttttaaagcataaacttttgaataagaaaatacttgaaacttgggctagaataacaccttgtattagtagtcagggtccagacagggcacagaaaccactcagtcacttaaacagagatggtttaacacaaataagtattaactacttactggaaattaatttttaataggaaataaaagagatctctaaagaataccttaagcctgaggaatagtacacaaacaaggaactaatatggaaagataggagctcaacccaaggctggattcaaacttctttagaaagtgtgtgtctgcctcccatgggatgacagagaagtttccttcattgacccaatccagaacaagtctatagccagtgagctgaagctagtgtgaagagaatattggaggggaatgctgacaaaattcacagggaagtagcctatggtggggaaccattgaatttgctagaaagctgtctggtgtattcattggacatggtgggaaactacctgtagtggatgctactaaacttgaggaaatgaggtggggctccaggaagctgcctatggatttgccacccatcctcaatttgcttattgggtacccatagaacttgtcaaacacgacccatagtgttgctgaaagtcttctgggtaaagtggggtggatgaggtgagccttactgggcattccataggccagcccagagtcacaggtttgaaaaagaattaaaagcacactgggacagacaaacctctacctcccccattgtcactccagcatcctttactgacagaacttaatatcatgtcagctggcaaggggagaaatgttcccgtgtcaaaaacaggatcatgttgaaaggcaaaaaattgataactggcaaatccctctgtaattcactggctatgtgattttgagtaacagttttaaacttacgtttcctcatcctgtttcatagggggttttttttgtgagcaaaatataaaatacggcacttaaagtactatggttccaggaacacagtacatattcaataaattattcaataaatttaatacatgatcagcctttttattttgactagatgatattctagagtatcagccctcaaaaattgtgtgtgtgtgtttgtatgggtgtaaatatatatatatatatatatatgtaagtatatattaaaatatgtaaatatatatttaaaaatatgtaaatatacatatatatatatcccactgagggcagtgattggtaaataaatgcagatagtgcaatatgaaatataatgaaatgcacatgcctccattagttaaataaaatgtgaagacagataaaaaggatttttatcaccctctaagtcttaaaatcagaagctctccacttgtacctcaatgattaagcagagtgttaaaataacaataaatctaaaataagtaaacttgaaactattatcagtcctagctgtgtttatattacatatttggccagtaataacctgggagttatttgacaatgaaaataaagcatatttagtttttacggctttcatgaaaaccacatcatgttaaacataatatccttctcaaattctgttgtatcagcctgtgataagctgattagacctgaaagatacaatgttaaattaaaacaatgtgtagtaataggacttttgtatttctcaggctttgctcagcactttgatcaatttcaaactacttaggtaaaaaagacacacctaataatttattagctaaatcaatcctttggatatttccactatctagttaaaaagactgttgtttcgatgcagtagaataagccttgggataaattatctgagaggctgaagaaacaaaatgattacagtaactgagtttttaaatcaatttaaaaaattcttgttgtacattaatgtgttataatcaagaattctgaatttgttttaggccatgattctcttgatttttggttggttaaacaaaaaagtttttattttgtggttattttctatttttattttattttatttttttgagacagagtctctccctgaagcccaggctggagtgcaatggcacgatcttggctcactgcaacctctgcctcctgggttcaagcaattctcctgcctcagccagatttgctattaataaacaaagtgccttttaatttgaagatgagccttaacctattttttaaaatcaattaagtgcctatgtcagaggtttgtgaggtttttatatcacctacctaatgtttcttatagctgcaattatgcagaactaaggtaacattcaattgcctgttaaatcagtcaaacagccagacttttattgcctatgaatatttaaaagagatttgctagatcccatccctaatttcagagtgtgagtttgcattcaaataagtaataaattatttccatcacttcaaaaggcatctttcattcttgataatcatatagcactatattttctactcacagtaatgatttgaaagatggttagcaaaccaggcaacatctccaacagacgtaccaaatcatatcatttttacaactattgtaatagctttattctctaacagggtaaccaagcagcagaagatgatttagtaatacaacaaaatgaataataatattggtaatagtatttggttacagaggctcaggtacccttttaattgtcagatatgcattttctcatttagttctcacaatagccttatgatacatggtggtttttgtttttgttttttctttttttgagatggagtctttccctgttgcccaggctagagtacaagggtgcaatctcagctcactgcaacctcctcctcccgggttcaagcgattatcttgcctcagcctcccgagtagctgggattactggcacatgccactacgccaggctaatttttgtatttttagtagagatggagcttcaccatgttggccaggctggcctcaaacacctgacctcaggttatccgcccgcctcggcctcccaaagtgcttgaattacaggcgtgagccaccgcatccggccgatatatggtttttcatattcccattctacagaaattgaaaggatattaaaggccctaggaaaaagctattgagcatttagacccatctctttacacttgaagcctaggcacgtgaccatttggctacactacctccaatctctgtgacccttttcatatattaaaaataaaaactctgctaataagtgaatatggcaattaacgagtttccccgtttttaaggaaagcttaaaacatggccttaaaagtattatggctgactaattaaaataaaatttagagtcttaaatattaaagtcacacattgagaagtccaaagcctttaccacttctcttgatgagtgattatttcacctctttcgtggcttattaatgcccgtatttcagtccctttcaaagatgtctgtaagttgttatgcctgacatgaaatagcaaatttactgaaagggacaaaatctaaattggttaattcttctgtaatagtaacatttatgatagactcagagagggccgtattaatttttcctggtaattatgactttgaatttttccctcagtgtcacatctaccttagcatagatagaccagaacggaagaacattgcttgaaggaagactataaagtaatctaggaaaataagtggcatattatgctttattaatttgtcaatatgttttgtagacaatatctgtctataataatagtaaaagccattactttttgagcacagttttacgtcagtccttttgctaagccgttagaagcaacatcaaacttaaatcccacatttgctttatgaaatagatttgattagcttacttcacagttgttgtgatagggctgacttctgttctcaagggctaggacagctaagtcttctgtaatgccctctggaaagcactaggatgctggaaaatgtctagtagttgtattttatgttgctttcaaagaagtataagtaaacctttaaaggctaggaaaaaaatcagatgaaactgaagtcatgccgtaacatgcctatgaccactgacatttgtatggtggagataaaagctaagactgggaaccccaattttaggtgaattaagtcatttgatggaaaagaaatatgatcctctggctcacgaaaatggtggagctaaacacagattccacataaaactggggttctatcagtaagataatgggcagagagaattctatctgcagagagaacaaacataaaaagacatctgtcttctcactgtgagtgcaaagtaatagaataattataataatgtcacctgaaaatgtgtgttggcctattcttgtaaggtgaggaactcttgagtgtatattatcacaaagggtaaagaaatatccaaacaagtgattaagtcagggtagcaccaggttaggagcgtcctagcattagttagaagcaaatgcaaattgtttaccatgaaaagtgccctcagtgtcctcacagattaaactcaggggaacttgagctcatcataaacacatagacatacacacactcactcacacgcacaagaaaagccctcatgaagcacagtcagcctatacaacgaacggtgagtttacttctagaattccggatattagaattgcaagatgtatagtataaaataaataggtaaaatattatagaaataaatgttattgaagttataaaaaagaaaacattgtaaaaatggaataaagaaatcaaaattaaacaactacaattaaaaattagaaaatgaatatatcatatataaacatattagttgaaagaaatgatttaaaagaaaactaaaagagaatgtacagactgtgttaccaaaaactaaggaggtggaagatgtgaacaataggtaatagatacaggggtggggagtagaatatgaacatataacttatctcaatgggagttttcaaagaggagaataaagaaaatggagattattattattcaatataaaaaaattatataacccaatttaaaaatgagcagttgagctcaaaaggcatttcttcaatgaagacctacatatggccaacatatatatgaaaaggtgctcaaactcattaatcatcagggctatgtaaatcaaaaccacaatgatatatgtcttcacatctgttagaatggcagttacttaaaaagaaaatcaagagatgacaagtttggcaagaatgtggagaaaagggccccttgtaccctgatggcaggaatgttaattcatgctgacactatggaaaacagtatggagattcctcaaaaaaaaaattaaaaatagaattactatatgatccagcaattccacttctagggatatatccaaaggaaattgaatgagaatcacaaggagattatctgcactctattgtttattgcagcattatttacaatagcaaagatatagagacaacctaaatgtccattgacaggtgaaaggaaaaagaaaatgtgatatatacatacaatgaaatattattcagcccttaaaaaataagcaaatcctaccatttcgctgtaacaacatggataaacctggaggacattatgctacatgaagtaagccagacatagaaagacaaataatacatgatcccaatcatattatgaatctaatacagtcaaactaatggaaggagaatgtggaatgcttcctgccaggggctaggggaagggaaaaatggagagatatttgtaaaagggtacaatgtttaggttatacaatatagataattcctagagatctactgtaaagcatattgcctatagttagtctatttacttaaactttgctaagaggatagaccttatgttaagtgttctgttacagaataataataatattagaataggaggaaagttttggagatgatgaataggtttatgtcatagattgaggtaatgtttttatcagtgtatatttatctccaaactcagcaacttgtgtatgttaattatatacagctttcttgtatgtcataatttttttgagaaatggagatggagtaatatatgaaggatattaaaggaaagtttccaagagccagtgacataaaccacttaaacagaaagcacattatataacaggcaaagtaaataaatagaaatccaatctcagacatatcacagtgaaagtgcagaaatccaaagacaaatttatattagcagctagaggtgagatggataacctacaaagcaattaaatttaggctgtcattagacttcttatctacaacaatgaataagaataaaaaagcaatggaaaatattttcaagatattgaaaaaattaccgtcaacctagaattctgaactcaacaaaattagttcttcagagtaagaggaaattagacattatcagagtgaaaaaaaagtgaaattttaccccaatagacccttactataaaaatgtctaaaataagtatgaagaattagaagtagtagaaaaataagttttaaaggttttagatgcaataagtatgatgaaaaaatagttaagcttttaaatacaaaaggcatttgttgcaaaaaatatataagaatatctaatttcatttaaaataatgttgatctaaaatactagattaaaaacaatatggaggggagttacagccacaagcccttttatttagaaagagggtagagatagtgattaaatgtcgactttatgctgtaataaattgtcaaggataaccactaatggagcatccacctgggaaacaatcaaagaatgataaaaggaacagttctcaatcagtacgcagtaaagcaagaaagaaggaaaacaaaacagaaaaatgtgagatgagcataaaataaaagaaaagatggtagaaaaatagaaatagaaaaaaatagatggtagaaaaataccagcggccgggcgtggtagctcatgccttaatcccagcactttgggaggccaaggcaggcagaccaggctgccaacaaggtgatacctggtctctaccacaaatacaaaaaaaaaaaaaaaaaaaaaaaacccaaaaaaaagtatccaggcttggtggtgggtgcctataatcccaactactcgggaggctgagacaggagaatcacttgaacccagggaacggaagttgcagtgagctgagatcatgccatttcactccagactgggtgaaagagcaaaactctgcctcaaaaaaaaaaaaaaaaaaggaaagaaaagaaaaagaaaaaaaaaatacatctgtagtcctagaactatttgctcaatacatttaatatataaatgtagaaattttcagaataaagcatcaaaattcaaaatacattgtttttaagaaatacataaagacacatatatcgaaaatggaaacagattttccgaaaaggattaatcaataaaaagcttagacacctaatttatttccagcaaaatagacattatggtcattatcattattaggcaaaaaatggagtaaaatataacagttctaaaacttgtacatacctggccgggcatggtggctcacgcctctaatcccagcactttgagaggccgaggtgggtggctcacctgaggtcaggagttcgagaccaatctgggcagcatggtgaaaccccgtctctgctaaaaatacaaaaattaaccagctgtggtggtgcacgcctgtagtcccagctgcttgggaggctgaggtgggagaattgcttgaatctgggaggcagaggttgcagtgagctgagattgcagtctccactccagcctgggttacggagtgagactctgtcaaaagaaacaaaaaaatctcgtacatacctgggaaaatacctttaaaacacgtaaagcaaaaatccacagaataacaagaagaaatacacaactatatcagcatggtgggagatttcataatgcctctttctttcaagacaccagacaaaagttagtgaagatagtgatgattaacagttgataaggtggatataaagactgtatagagaaccccaaatcagagtgtaaatttcatctgaagtacatggaaatgtcaatacatttcacatatttggtattattagggaaatactcttaaatttgtaacaagctagaatcaatagtaaaaacttgactaaagtaaataatttgtggatcaaagatgaattcaaaatggatggttaaaattcatagaaccgagtgataataaaaataaaaattaaaactaattggttcctgttaatttttgtagaagagacggaagggctgaaaactagtgagctaactgcccatctcaagaaaatagggaaaagtataataaatgcagagaaagtaaatggaaagagaagaattcaagagcagaaataaataaaaacaacatggaatcaataaaatttaaatgcccatattcatgttttaattagacaaatcaactgagagggaagtaaaaacaaatataaaatcttaaggatgaaaatgttataactacagttataatatatttttaaaatacagaaaatactaaaagctatgcaaataagtttagaaacttacatgaaatggatgaatttctaggagaatattgctacaaaaatgatggaaggggatatagaaagcctgaggagacagaaatttaatcacaaattaaaagtcttcctacaaagactatattagactgaaattattttacattcaaatttgaacacactttctaggaatagataattccagtcatcaacaaactcagtagaacatacaaggcaatatacatgtctggaaaatataaggttagaaaatttttttttttttttaccaaaatcagacaaaaatgaaacaggaaggaaaaccccatgccaatttcagtcataaattaataaggaaaagttctgaaacaaattattggccaactggatccaagtgtgtatgaaacagtgtttaagcttaatgttctccctttcctttctatattcactctttataatactttatgcagtgtcatggctttaaataaaatttacatgctaattattcccaaaatattatctctggcacagacttttgcccttaacttcagaccatatatccagccttctattgtgtatttttctctttggatatctcataggctactcaaacttaacatactcagatgacagctcctatcaaagctacccaacaccgttttctccacctctgttaatgccatctcattcctgaaatttctcataccaaaacttttaaaatgaactttgattcttgtctttctttaccagcctttctcttagcagatctgaaagatggtctcaacagatctagctgttgttttacttttatgttctgggtatatatgcaggtttgttatacaggtaaacagtgtgtcatggggggttggtgtacagattatttcatcacccaggtaataagcatactacctgataggtattttttctgatcctccccttcctcccattctctatcctcaagtaggacccagtgtctgttccctcattgtgtccatgtattctcattatttagctcccacttataagtgagaacatgtgatatttagttgtctgttcctgcattagtttgctaagtagaatggtctccagctccctccatgttcctgcaaaggacacgaactccttctttttgtggctgcgtagtgttccatggtgtatatgcaccacattttctttatctagtctaccatggagggcatttaggttgattctgtatctttgctattgtgaatagtgttgcaatgaacatatgtgtgcatgtgtctttgtggtagaacaatttgtattcctttggctatacacccggtaatggggttgctgtgttctgtttttagctctgccaaactgctttccacaagggctcaactaatttacacccccaccagcagtgtataaatgttctgttttctctgccatcccaacagcatctgttattttttgacattttaataatagccattttgactggtgcgagatggcatcttatcgtggttttaatgtgcacttctctaatggttggtgatattgagcattttttttcatattgttggccacatgtgtgtcgtcttgtgaaaaatgtgtgttcatgtcctttgcccatttttaatggagtagagtttttaaaataaatttgtttaagttacttagagattctggatgttaaacctttatcagattcacagtttgcaaaatatttctcccgttctgtagtttgtctgtttactctgttgacagagttcaacagaggaactctgtgaggaagttgtgtaatttaattaggtctcatttgtcagtgtttgcttttgttgcaattgcttttgacatcatcattacatcttttcccattcctatgtccaggatggtattgcctaggttatcctccagggtttttaaagttttgctttgacattttaagtctttcattcatcttgagttgatttttgtatatggtgtaaggttttattcttctgtatacggttagccagttatcccagcaccatttatggaatagggagtcctttcctcattgcttgcttttgtcggctttgtcgaagatcagaagggtataggtgtgtggcattatttctgggctttccattctgtttcattggtctatgtgactgtttttgtaccagtactgtgttgttttggttactgtagcactgtagtatagtttgaagtcagctaacatgatgcctccactagctgtatttctttgctccttctctcattaaatatagtctctgtgttccaaagtgaggaggaacaactgtgagattaagatttggtaaaagagaaaatgagcagggcaaatagagacaataaatctgtgatgatgaaaaaatgagaaagaaaggccagtaactgaaattgaatagtaatagggcagaaaagatgtgttgttgattttcaggataataaaaatttaagcatgtttgtagtataagggaagatccaatagaaagacataatatataagagcaaagtcttacaagataggatacacgagcaaaaaaaatggaaggattgactttggaagtgggaaagagaaaattgagataatacaaggaggttctgaggtggagagtagtaagtttgagaaagtttatccaccaaggataaatttatccctgagaagtaggtaactctgttttcaggttgtttaggactctgcacggtaaagggggttgggagaaaggagaactggtgtcattgaggaaatgagagtgaaaagtatttggaataggagctcttttgttttaaagattcgtttaaaatcaggagaagtgttagagaataatatcgtggactcagtagtagccaatgaagttattcgcaatggaaataatcagttatctgactttctcccgtaattttctgcaaaataattttatttagaaccacacacatacagccgcatagaaaatcaaaagcgaagggatttttctttgcgttatctttgattagcatctccaggttgtatttgattatattctgaaacaactaggattctagtctgaagtatcttcttccaactatattcatatttgcaagtcattcatctggttaccgccagtatgtcaaatgtgaatttcatgtatttttttttttttttttacaatctctctaacttaaccaatttaattcagatttttatgtcagtcttttagctgttggctgtttttcccaaaatgtcaggatcggctccataatttgggggactcagggaagaaagaaaatactgggtcccatactcaaaaattaagcattgtaagatggcaacagcagagcattaaaccaagcatgggctctcctaagcatgagttactgcataactgcacaggttgcatggctttgaagccaatttcgggtgtcatcttatacatttggttatttgtacacctgaaatgcttttgataaggtttgggagttaacaatttaggctcacttttatagattatcattacttgaaaatatttcattgaggataattaattaacaataaatgctttaatatttagaaaggtgaaatttaatcttattcttagtgtgttaataatggatatagcttctaggtttacatctttccatactttgaattcagggctttctttccttaagtagtaaaaaggatattggatatcttgaatcttgacttctcctaggttgaatgctctgcaaaaaacctttgtctttatataaaaattgcactgcaagcagactattatggcagacctctgtgttcaaggtgactgcaattttcagctgagtggtggactatgcaacttgttctcataataatattaattgaataaatggtcaagagtgattacattttgaggggaagaaacccacttgtgtaatatttacacatagataataaactcaatagcccagacctctttaatgtaagaaaaatagacatgaatgtgtatgctattttctttgtaaattagaaatttttccttctctatttcatgtatcttcttttgttatttgagaaagggatttttcttgtcctaccatcaattgtgtgagttaccttgattcttgtttttaataatattttaaaatacatcttgtattttaaatgtagttaccctctattttatagctacaggaactgaaagagtacatagccttcacaaaagggtctgtggtgaatgtgtttaattcttattttaatcaccatgaatcatggattttttctttgtaagtagtaattccattatttttagatataatttaccctacttcaatcaataatgtttccttggacagtcatatttacttttccgaaatattatataaaacagtagttaaatgtttttgttcgtctgtatgcctattatagaatattagcatttttggggtccagacacaaagggacacacaaacacatatatatacttgcatgtatttatatatacatgtatataagcacatatgtatacatataatcatgtactgcatttcaatatatgattaatatttaagtatttaatattcactctagacaaattatgtttgctcttggagggcattaatatctttgtgaatgagtgttaacatatccatttaatggtatcttgtcttcaaatatctcataatttgatagttgagttatttcttctgaagttggaatagcttttctacaagggcctaccaaaaaaaaaaaaaaagaataataaagttggaataacaaaagagggagttaatacataaaggaaaaccattaaggccgaaaaactaatcagttgtaaaagctaaatcagtagtatggattgataaagtagcattttagtgataaatttttggattgaagtttctcttttaagtttatcaatgtaccttttcagaaaaattcctcgagtttatatctttatgttaatgaaacttgtcaataactttaattatctatgatgattgacaactaatacttaatttctataacacacaatactgttctgagggtacatattcatctctctctttcatcttacgttttaccactctcaactttttaaaaccgttttctttgcaagctacttcatagattcttgagattgaataatcaaatctgttatttaatattcaggccaaatttctgaaaatgtttatttttttaaaaaaaatgataaatggaaaagggaatgttaaacaacatttctttgcagtgtattccagtgtccctagatggaatgaggaataaaaatatttttcaagttcatcatgctgtcttttaaatcataaaatgcatatatttattagtaatttttcattgaaagtatcaaagaaaattggagaatttccttactgtttctacctcactatgtttcgtatattctgaccagcattaataccaatttcatagcactctactgttcgctcttttttgctgtaagcccaactgattgcattttcttacctgttatttttcgttgttgttatttaagacatcttttctttctaacttcggtcttcatagaccttctcaatttcagctcatcaccaaaattacacagatagaagaatatagggactttggtgtacacatacccacttttgactccctctgattttctaatttagtagattttaattgaggctgagaactgtatttggaaaagttcattctgatgattattcaggtttgtgaaccccagtctagatagacctttatcagcacatgtataaggtgcactttgctaaggtgcattatgtgtcaggttcattcccactgtggaccagtaatttattcttgcccaaccactgctcatgacagatagatgatctctgtattccagaaatgaagctcctttccaattcctcaacaactaaaccaagcagaggaaaaagtggttttccttcacagccatagttccctgctgaagtagaatgaacgctttctaggaaactgcagcagatttttgatgacacggaaagggcatcactaggatcctcattatatattacctctctccctcacccgaaccacaatgttgacggaacagatacttcctgtggggaagatgctaagcagtcctgcatggctgtaggcattgtccacatcttaatcttcagctatatctgaggtatgacaagtttaacaatcctacaagttaaagcgtcacaccggaaacctgtttattcttctcccatgccaaataattccagcacgatgggtttcatctatagacgatgagaagatgccattgtggggtgaggacatagagaagagaggaagtttggaaccagtttatttctatttcagcaagcttaatgtattgtaagaacattttgtggcagatgaccctagtctgtaacaaggaatcgattgtaatgcatcattctgccagtgtttatctgttccctatgctcatataaacacacgagtcatctttctgcactcccaacctactcctaaagcactatacagaatgtttcgaaagcagaaggaaaagcagctgttccatacaccatgttcctgctgttcaaggtgcacatcccatccaaatgaatcatatcagagccaaagatcctggtaggagttcttttctacaaaactgcagtcttgtctatcctaacaacttggaggacaaaatattagaaaaccttgtaataaccttaggacacaataatgtagatactgactgagctagacctgaggactttttcaatgtagtgtggataagtaagatgacaggaagccataagcatactgtgccttgcacatcaacttctccagagccatgacaatcatctggagtatttgtgataaataaatattgttaatcttcatgtaattgggtaggatgaaaaaggaccagtcgtcccagacatcccaggagagaggagcatttttccagttgctcagatacaatttcaagttcgaaccaatatgaattacagttgaccacagaggccggcaaaatccatggcactgtagtccaagagaacctgaacactggccttagagtattatgagcctacatcacagtagaaggaatccagcagagatctctaatgcacatcagaaaagcaccatttctagttatcaaggctgtatttcacactgcttgactgaagattggaaactattttattcataggcaacctgtgtggccatccttacctggtctataaaaggaagtgtgatgaatttgcttcccatacatcatattaagtccagaaagccagagatgctgtgttgagtttctttcctgagagtctgaattcctaagtagagggactaacgagttccaaagttctttcactctgagatctttgtcacactactgtactgactggatatcactgaccttatttaagaggactatcaactggctagttcatctacattgtaaggactagtttgctcacaaccaccaacctatctgtaattggcctcagtatgctctctctcacttgggtacttctgtatttggctaattaacctataccacttggcttagaagcaccagctacattttttctaattttgacttctcatcttttccaacttgattttatccccagatttggacttttgtctcatgtataaactttatattttgcttgaacatgtggtctcaatgctgaccaagtcatccctagaatctgattctgtctcactattccatatcaggagacagcgacttaaatattttaattatttcctgtatcaataaattattcactgcctaaagtttagactttaataatatgaacacatgtgcagtcaaagagtacctcgccattgggccggaaaaatttcactgacttagggtggctcctgaaggtaccttgagaaagcttggatatgatgaatcctgtagacttattttatgtttactgaataatgcttcattcactttctttttgaagcttaaataaagcatcagtttgctcctgtcagggcagaagaccaatttcacttgtctacccatgaggataaatggatgcagcaagaatccagaaatgtcttagatatattactctatagctcattgaccattctatcaatgctcaatgctttacttgaaagtgatggctatctgatgtcaagttccattgataaaatgattcccaaacgttactttcaagtatgcttccttcagaggtcacagaagaacttcagtaacctgctaaaacctaaaacaggtgaagttcctattaaccatgacaccaagagttttcacatttatattctttcctggtaaagaaaattataggagctccatgctcacggcttttgagttttctcccaggtgtgttcaaacctagtgacattaacaaaacataaatctagaagcctttcgtgaataatgtaaccttctttattttatatttaaaggatatatatgcagacatgtacacatctttgtaattatttaccgcctatatccctattaaatacattaacaaatatgccacaggaaaaaccactgtaccaaagcccctcacaagagttatatttaaagtgggttaaagcaacatggttttaatttacttagtctttcttgtccaaggaacacagtgtgagacctcctttctttaggaaaaaataggatgaactaatttgaaaacaaagaaagcaacaaagtgaatcttgtgatgagctatgagcattggtaaattatttcttctgttgtaaattatcctcttctccctctgcttttctcttaatctccatttaattcccttttcaaaatcctaactctattctttttggaaaacatttcattaagctggtataagcatatctagacatctggaaatttttgtataacttttaaaggatctattacttaacaccatatgaaattatggaaaataaagtgttcctatctaatcaatctcaaagatttttcaagtgtacaatacaatgtgtgcttcaagtgtcagcttcttttttttttttttttttttttttttgagacagagtctcactctgtcacccagactgtagtgcaatggcacgatctcagctcactgccagctctacctcccgggttcacaccattctcctgcctcagcctcctgcgtagctgggactacaggcgcctgccaccatgccaggctaattttttgtatttttagtagaaacagggtttcaccgtgtcagccaggatggtttcgatctcctgaagtgtcaacttctttaaggctgtcatcttgccggttctaaacaactaaaaattgtaagaaccaatttctgagacaaatagaacattcttagtggtccttaaataattcctgatacttttatggcatgcttctttaaagaccttagaattatgcttcaggaatttaaattggttgttcagcaaagttaccaatcagtaggcaagttgttgcatttgacaggagcaatagttttcacgtggattatttatattcatgtatgttggtagacggatataaaacatgcaacttgcagttgcatgagacaaaagcatcaacatatctatcttagcttttcaatcatgtgatactactataatgctccatttttcacagatatttcttaagttctttatctcttcagacctcccgtaaaccattttctgtcttctgctggaccacattctagatgatctggatgtctatcattctcctttgcctttgctttatttgagtaagtgctgaattcgtggactgtgttagtagtttgatgcgtagtttcagccagatagatcagaaacatgaaatgcttttacatcatccaggtagatggcgccatgaatagatccctttgctttctggcctctgaggtaataaagacttaaatctaattgggttcagcttaaaatctcaatgtcatatttaatttaatatgcttccttgtttccagctcaagcttaagccatggtctaaaagactttctctggaaggcaagtgtggttagattccatcttacacctccactgcctctttttcttttttttttttttaactgcacttcagttatattattctccaatgtcttgggaagtaggagttaaggaaaataggcaaatgtctcctgttaactagctatttgtagctttgagtttatgatttgtgtgtgtgtgtgtgtgtgtgtaacagagatacaaagttcgggtttatttggggtacaagtatgggatctttaagaagtcttgcagaagctcttttgttttccccatctttaagaaggaaaatatgctctataaaaacatcttcaagcctcttgatcctgaggtactcttgctccataaagagtgttcctggtagatagctcaaacatggctgtcttcttccacgttcacttgacctattgagaaacgtttgccacaccaagcactggggagtacaggctgccccccttcttcactgtatcatttctcattcattttttacctatcaagtaggcatataatttctgaagcagacatcttcagaagcagagttggtaattaggtgtcatccctatctactctggactcccagaccctgtgatcagtggtcttggagctccacttacttgcatgggacaaaaaggttgaagtaccatcttcttttcccccttacggaataaacagagggagccatccctactctccctctgggccatgaattcagaagaccgattctttctaaaaccttcagagagttttagtataagtgggtatggtggagcaacaaaggcagggccagttttcccagctcttttgtaagccctttgctatgccctgctatttccatctcttagaatgagagagacttattacttgttattttcagtttaagactatacccaaaattctaagacaacagatagaattcaatgcattcatatccatagtgacagtttcacacttgctcttaagttaaatagaagagttaggtcaggaggaaatagtttatcaaaaatgatatacacccaccagtattcttagtacttggcacttgaacaaattgcaacctgttagtaggtaaaaaagaaacactaaaaggaaatagttggaccactgaactattgcttgatccactgaagcaagtgttgcttggtccactgaagttgagactctgggaaagaaaacttgactggtaaactctgtgaagtgaagcgtggttgtcaaatggagattaatgtcctctcatgggtctccactgtagtttctgaagggcaggttgagtaggatttggttttagcacatctcttgcaggactcctatcccaagacactttctataaaataaaacatattccatattgctctactttctgcaaggtacggacagtcaggttggggccaattaatgcactaccctaagcagaaacttcaagactttgtcgttgctttgctttatttgaattggaatttgggatttagttttcgttagttcatttactactaaaatcactcataaaaatgagggctttattttgacattggcaaaaatccttctttactcagaagaaaatatttaaaactgctggaaattgaaatgttttacatgtctacatcacaatgatgaatacaatgatgagtatttaaacaccaaaaataaaagtgtcttattacgagatgattgtaaacagtgcacccacattcttaatccatttgcaagcataagcttacccatcacctcataaatgcagtaaaattgctttttgtattgagtttaataagtatagtataggatacctagctcctttaatgaatgtgttttttgtaaaatattattaaatgattttttttctaatttggctttttaaagcatgcattcatatgttaaatacattttttggtttcaatattcggttttttatttcacatgcagagttttctcttccagagtttcttagacatgctacactttgatttatgtgtttgtaatattgtggtacaaaggttagtacattatttttaaaatggaaatgtgagaaactgtcaattcattgtagagatgactttacattgccagcaaaactcattaaactcttaaaactttttcttaaacttattttatatttccatagtactttaaagatataaaataattaatttgtgttaacttttacttagttttaattttcattgaaaactgggttaaaatatattatgtgtttttcttggtaaccattactaggattgttttctatttttatatttttgtcattgatcgccagttattaaaagatgtctttctaactttccttatatttgctgtttctgtctagctatataattcctcttactgctaagtggattagctaaagacatgaaataacattttaaaacaacagcggaacagtattctggaacaacaacaaaaaatcagattatggttgaagactttctacaaacttcattcaatgagacagcacaggtcaagcgggcagaaagtcagaaaattcataagcctgacattccatcagggtgcgcctaatcagatgtttagaaatagaaggcagcttatgccatgactagttgaaagaattctgcaagcttgcattgacatgaggtcttttcaatgactgagataatcaaggaatctgtgtaaatcagcctctcttattgactgtcaggccaggaaaagagccaacccacccgaagtcaactctgccatcatttcttaagccacactgttcctttcagctcatagaatctcatgaatagaaaaagttaggtttctaaaaagaattttgaggctagatatgtggtttaatgttattctatattacatcctatacaattaaaatctacagatgtgccttgtagagtacactgtttttgcctttagccagaggaaggaccaaatttaatacctggctaggcaattattacacgctgtgattggaagttttctccaaccacctgtcacaatgctgaaattttatcactagagatccatttctttggaagagctgtgggtaggctgcagccagtctcctctgcaatagaggctctgattatagccctgaacactgttatctgaaatagtaaattacctgatgtaaattttagttgaaattttgactgagaacaaaaggaagctatgtttgaattggaatatagggcaaagcctcggtcaccaatcttggatacagaattttaatagaaagagattaaaattttctccaaataatgtcccacccccattctgacacttttaatacaaaaacagatagatttattgtccaaaagatacatctctgagcagtggtgacctttgtttacaatttcttctgtaaatccattttcgtctttgactatttaaagttttctgtttttctcattaaaatttctccttatacttttcacccagtcataaataaagctattgggcttcattctaggaactggtattgagcaatgaacaggacagccgtaatccttgaactcattagagttgatagtctaaagtaaatgcagaccattaatgggagattaaatatgttatggcacatacaaagtgcaagaaagaacataatgtcatgtgagggaatgcataaatagcttaatttagccatcccgtaacatattcatatattaaaacatcatgttacgtgctctaacttgatagaatttttacttgtcaaatcaaaaaaatacaaaattcaaagaacatgcaagaattacctccctgaacttagaaggtgccagaggtagccacttggaagagatgtccactacattaagaagataaatgtaaattagccaataaaaggaagtcagaattgagattatgccagtaaaagggaacaacatgtttaaggccaagaatcaagagggccacagtgtaggttgggaaataaaaaataaaatttctgtatagctagagcagggagtaaaagacaccagcaggacttatattatgaagggacttttaagccacattaaggataaagcttttggctgcgcgcaatgtctcacgcctataatcccagcacttagggaggccgaggtgggtggatcatcttaggtcaggagtttgagaccagcctgggcaaattggtgaaaccctgtctctactaaaaatacaaaaattcgccaggcatggtggcaggtacctgtaatcccagctacttgagaggctgaggcaggagaatcacttgaaccagggaggcagaggttgcagtgagcagagattgtgccactgcactccagtctgggtgacagagagagactccgcctccatctcaaaaaaaaaaaaaaaaaaaaaagaatagagcttttatttgaaggacagtaaagaatcactagagaattttagacaggaagccccaattcgttattgagagaacacattgcagctgctttacaggtgggatgtggcagagtaaaatgccagtgaagaaactgatagcatatttgaggtaagatatagtaatgattttaactagagtaaagacaatggagagagagagaaaagattggaatcaagaactatttagaaggtataataaataattagtgattgactgattagatgcaacatgatgaaggacatgatagaggaagtagaaatatctagaattacatctaataaagggaatcattatttgtttttcgctgaaaccggaaaaaatacagagaaggaggaaaagcaagttggggagttgagaagtaggtgagaagagtatatgcaaggagttcatgtgtgggagtgttagcttttggtggttgcagaatattcatgaggagatgtccaatagggtgagataacatgcaagtatggagatcaaggggagatctggacttgagagatgtagagttgagagttgtcagaatgtgaggaggaattgaagttaaggtatgggtagaatgagaagaaaggaaagcccaggataaaatcttaatggagtcaaaatttatggtacagggagaagtactgggaaagccttccctcttcctgcagcatcactaaacttcctgttcttttgccttagtctagatgcctttaactgtagttttacttgggcaaagctgtgttataggctggcttcactgaagaataatgacatcactaatatttttaaagcttaaaaagtatagtatttatgtaatatctaatattctatatataatataaaaaccaagatcatcttaaaacctcagtcatgctctgtgggaaagaaagttatattgtacctgataatcatgcctttacattgtatattaaggaaatgtattttaaatgacacataatgaattcccaataagttgcctgccctatttcttacttttacaactactctgttaaaagtgaacagatccttgaagggagactttccaatctgtgcagcatggtatttatacttgaacattattgaattatcctaatcatacttatagttacaatcaagattaattgcagctatattaggattacttattattttttctacttcagcagtaacataaacccaattgtacaaacaatttctgtaatccaaattgtgaaagaaagtagggagaaaaaagatcatgcaaagctggttgaaatagtattcaaaataaatctttaaccagactgttatctaaaattctgtttttgacaaggagctgattctgaacagattgtacatgtatctcactggtggaagcagattatctgtcttgaattggattgtgatgacgatgaccctattctaagcaaaccaaatctcttgaactatataatgagatcaggaggaacattcgacctgagaaagacagattgcaatgactgagatgattttgctaattttttttccagcctatttccttaatgtacgtgatattgtgattgattttcatgcagagatccctgatcctatagttttgtttgctatttatttttctccttcacattttttttctatcaacagagctgaatgagtgccaggaagctgcgaaatctgtcttacaaaaaggtgattgtggaagagtctagaatcttcatttattgttcagcaggattacagaaaagctatcaagagtaaacatttaactgatacactcttattccttctttttaggctgtaaggaggcaaaagttgcttgaacagagcatccagtctgcccaggagactgaaaaatccttacacttaatccaggagtccctcacattcattgacaagcagttggcagcttatattgcagacaaggtggacgcagctcaaatgcctcaggaagcccaggcaagtacatctgggaatcagcttccattcttttgtttttattacttcaacaaaatgttgcagtgtttctaactttaaatttattcaactagttttccatggggttgttttgattcactgatttgactatttggaggtaggtaggaagaaaagggggtctagatcattagtctaagatttatttttttaaggatgtaatggaggaatttgaaataaagacatttcaaagacaggagcaatacgttctggtgtttctgacttcaaactatactaaaagctagagtaaaaccataggatagtaaatggtaaagaaaatgttttttggccgggtgtggtggctcacacctgtaatcccagccctttgggatgctgaggcccacgaatcacaatgtcaggagttcaagaccagcctggccaacatggtgaaaccctgtctctactaaaaatacaaaaattagccaggtttgttggcacgcgcctgtaatcccagctactcgggaggctgaggcaggagaatcacttgaacacgggaggcggaggttgcagtgagccgagattgcaccactgtactccagcctggaacagagcgagactctatcttataaaaagaaaaaaagaaaatattttctatggcattgttggaaagcagtctcaaacattttattataaactcctcgtttagtcacatggtctatattgttttataaaaatgtgttagttacaagcagtgagtaacacaaaattatcgatataaatttacacctcaattattaatgatcatgctcaatatagctacatgcactcactcccatgcttcattcaaacgaaaatataaaacgtgtttacctgtttttctagaatgagaattaaaatagtgttgaaaataaatctgagttgacttttaaatgagtaaattttaggccataactaaatttacattcactgtaagaagtatttttaaaatgctgttctcattttttaattaacatttaaacatatgtgaagttatcataggtattatttattcaaaagtctttagggttgtgtgatcgcaattactagatctgcttttcaaatcttatatacatgttgtgaacccaatcaccaagtccatgctatgatgagaggagcactagaaggttagctgcaaatctcaaagccttctccctgccagttggtgaagatgtctgaagtttttcactttaaaatgaatttgggggtgatatattagatttgtagatcatggttacaatgcaattacagttaatgaatcaccgttaataggtgttctgggcaacagtatacacaatagcatgagttaatttaccatattgtctaactttgaccaagaatgtccctgataatatgtggcagagtataggtagttttgataggcttaaaaagtccagggaatattatttccttatggagtgcatacaattgcaatagtggatgaagaaagagaattttggggagaatcctgatgataaaatcctcatcatagttttccactgggcaacaagagtaaatattgtagtagaagtgagggataatagtaaacatacttgaggattcaatttttaatttgtcttgatatataatgattgtacatattttagagggtaagtgtgataggtttatacaaacctactccagtatatatatttttcaaacttacacaagccaggttctctagaattaactattcctaagtccgtcccagtttgagtcataatgaaaaaggttttttgatataaaatatttatacatatttatggatacaacatttatgtaatattttcttacatgtatagaaagtgtaatgatcaagtcagggtatttagtgtgtctaccacggcagggtttagtaaaatgcatgataggaatgagtaattgtttctgaattgagaagaactacatgactataaatgaaatacagagtagaactgctttcatttaaactaatgacatgagttttgaaggaatgtttgattaaaaatgcttgtgacgttctgaatggaattaaggaaaaatttgagcagtatgaatactagacattaatattgcaagtttgtacttcaaaatgcataaagaattactttgtgacagacttgcggaatgaaattatgagtagcaaatttgataggcaaagctattatactattgtctttcaaggaaaattggagcttttagggcgaagcatctttagttgaacaggttgtgataaggggcactgtgtgttttttcttatttagaaatggattcaggattttataaacattacttgtttttaatagcaaaatattttgcttggtttttctaaaaaaatactacaataaaaatgttattaactacatcagtagaaaagtactagtaaacagcagaacacagataaattatgaaatttcagatctacttcaagaaagagattttgggcattcagatcaaatctattttccatgcatttcaggtcacacctgcattatcaacatagttcttgacattgagtctccccaatggtaatacataatattggagaatacaagccatctgaaagctcttaaaacattcttctgctccagggttttattttaatatggcagtaagtgaattgttttctagaacagagttctcaggtactcagatttgcttcaaggattatatttcctgaaaagcagctcgaaattcccatgaaataaaatagagagtcaaaagttagatagtgaaataacataagcacagtgtgtaagatgaaggatccactaagaatgccaccaaaatgacattttaaatatagagatggggtggatagatggatggatgtatggattgatggatggatagatagatagatagatagatagatagatagatagatagatagatgaaagaaagaaaagaaaggaatagaatagggactaacttcaatgcattgtattaacaaaaatgtgtttctataaatttgcacttaaagataaaaaggttattgctaattaaaatattagtgcactataatttcttttctcataaatggtatatttagcttaattcatcacggagaagcaggaaaaaatgtatgaagttaccatattaagtcctctttgaaatacctgctcagattttctgtcatatactggtcacgcagatttgtgggtgtctgactccaccgtgtggtgcactgagagttttgctagttaatttgaatcttttagagcattattttttctgcattttaagatcgtttgagatcctcagatataaaagctatggcactaaggaaatgcatactgtatgtacaactttctgacaaccatactcttgttatatataaaagtagatgtagatcaggatgcttctttacattcacattggcatttattactataggaaagaaaagagctgctcacttccttagtgtgttaattgatcagttatttctctgggccctcagattctgaattggatttaaaattatgttacttattttagtgacatgagcttacctacagaagcaaagcttacacttttagaaaataaagctgcatgctgccaggatgtaacagcatgtgttgacctaggagtattttatttcaaaagataacacttagccaattcacagtctttttttttaatactttaagttttagggtacatgtgcacaacgtgcaggttagttgcatatgtatacatgtgccatgttggtgtgctacacccattaactcgtcatttaacattaggtatatctcctaatgctatccctcccccctccccccaccccacaacattccctggtgtgtgatgttccccttcctgtgtccatgtgttctcattgttcaattcccacctatgagtgagaacatgcggtgtttggttttttgtccttgcgatagtttgctgagaatgatggtttccagcttcatccatgtccctacaaaggacatgaactcatccttttttatggctgcatagtattccaaggtgtatatgtgccacattttctaaatccattgtatcattgtgagacatttgggttggttccaagtctttgctattgagaatagtgccgcaataaacatacgtgtgcatgtgtctttatagcagcatgatttataatcctttgggtatatacccagtaacgggatggctgggtcaaatggtatttctagttctagatccctgaggaatcgccacagtgacttccacaatggttgaactagtttacagtcccaccaacagtgtaaaagtgttcctatttctccacatcctctccagcacctgttgtttcctgactttttaatgatcgccattctaactggtgtgagatggtatctcgttgttttgatttgcatttctctgatggccagtgatgatgagcatttttttatgtgtcttttggctgcataaatgtcttcttttgagaagtgtctgttcatatccttcacccacttgttgatggggttgtttgcttttttcttgtacatttgtttgagttcattgtagattctggatattagccctttgtcagaggagtaggttgcgaaaatcttctcccattctgtaggttgcctgttcactctgatggtagtttcttttgctgtgcagaagctctttagtttaattagatcccatttgtcaattttggcttttgttgccattgcttttgttgttttcgtcatgaagtccttgcccgtgcctatgtcctgaatggtaatgcctaggttttcttctagggtttttatggttttaagtctaacatgtaagtctttaatccatcttgagttaatttttgtataaggtgtaaggaagggatccagtttcagctttctacatatggctagccagttttcccagcaccatttattaaatagggaatcgtttccccatttcttgtttttgtgaggtttgtcaaagatcagatagttgtagatatgtggcattatttatgagggctttgttctgttccattgatctatatctctgttttggtaccagtaccatgctgttttggttactgtagccttgtaatatacagaaaaagagaattttagaccaatatccctgatgaacatcgatgcaaaaatcctcaataaaatactggcaaaccgaatccagcagcacatcaaaaagcttatgcaccatgaccaagtgggcttcatccctgggatgcaaggctggttcaatatatgcaaatcaataaacgtaatccagcatataaacagaaccaatcacaaataccacatgattatctcaatagatccagaaaaggcctttgacaatattcaactacccctcatgctaaaaattctcaataaattaggtattgatgggacaaatctcaaaataataagagctatctatgatgaacccacagccaatatcatactgaatgggcaaaaactggaagcattccctttgaaaactggcacaagacaggggtgccctctctcactgctcctattcaacatactgttggaagttctggccagggcaattaggcaggagaaggaaataaagggtattcaatcaggaaaagaggaagtcaaattgttcctgtttgcagatgacatgattgtatatctagaaaaccccattgtctcagcccaaaatctccttaagctgataagcaacttcagcaaagtctcagcatgcaaaatcaatgtgcaaaaatcacaagcattcttatacaccaataacagacaaacagagagccaaatcatgagtgaactcccattcgcaattgcttcaaagagaataaaatacctaggaatccaacttacaagggatgtgaaggacctcttcaaggagaactacaaaccactgctcaatgaaataaaagaggatacaaacaaatggaagaacattccatgctcatgggtaggaagtgtcaatatcgtgaaaatggccatactgcccaaggtaatttatagattcaatgccatccccatcaagctaccaatgcctttcttcagagaattggaaaaaactactttaaagttcatatggaaccataaaggagcctgcatcgccaagtcaatcctaagccaaaagaataaagctggagtcatcatgctacctgacttcaaagtatactacaaggctacagtaaccaaaacagcatggtactggtaccacagtcttaaattaaattatatggccacagcatcaatctacccagtgtcagctcatttaatgagagattttattaaagtacaaaattaagaaaagatttattgaaacagaataaagcaaatggggaaaactcttctagatatggaaatatatcttagaaaacagaaactaggattatttccaaagtactatgattaaaaatgtaacaacctatgcgtgttccttggaaataaataaaaaattaaatcacgaaattgtgtgactgcaaagaaacacatggaacaaatttagtcatttactgttcaatttttcagaactatatattgaagcacagagtttagttttggcacctaaaatcctatagcaacagtctaagtaaccatgctgagccccggagcaatcaaatcaaatctttaggtggatttggtcttcagaatttttggaaacttttttattcattctaatgtgtagctaattggagaatggctttggatggttccctactagtaatgactaaattgttccagagtatttttcatacgacattttctatcactcttctataaagattctcttctatgactgtgtcaacgtttcaatgggagggagtcagagtggcaatcaaactactggtgagattctctcctattttgattttttcctctaatggaaaatgggtgatggaagaaaatatagctgagagctatcgcacaaattttaatttagacaaaaagaatgttcaatatagatgtttgaggctgaactctgcttggctttcttcaattcatttttttctaaccccatttgttaacatgtcaattaacttgcatatggctcttaatcattttaggggacagtgacaactatgtttaaatagctacttaaatgtcttgcaatttttaaaattacaaagatactttcacatacatgatttttttccttttctactaattttagttttgaatctttgatatgtaagaacaacccaacatgggcacctgttgaaagtcaccatgtccttatgtgttgatgcacattttgtaggggaaaacatggccctgttgcttaaattactgcaagcaagagcggagttgcttagcagtggctccagtagctttactgttctatttgttttttcccaaagaattctgatctcatttttttgtaacctcgtgtcccacatagtagatttatgagcaggaatagaggaaggaaacaaattaccttcaaagaagagtgcctcataattaaatattgaaaaatactgccgtggtttgctcaccaagctaggacgtcaggtgttccagagtccactacagaccagacttcctccttctctttttccctcccattaacaatgtgagtacaatttagaaaagaggggatttttaaagcaaagaaagctattaatttaaactaattacgttaaatgcactttaagaagaattcgtaattgcaatcttcccgtgtttatcaaagaagctaaatcttataactcacattaaatataatcggtcatctttaaatgttaacattccaagctatcaaaatcaatggcttaaaaataaagatataactgcagattttggtctatcagattgagcttttgatttcattaaggaataaaacagactcttatagtgtaaataggcatatttgattgccaaacgacttggaacagtgtaactttacagtctgctttattgatttatgagttagacagcagaaacctgcaaaggggaatttatgtggtaattggataatttagtcaaagaagaaaaaaatggagaactaacccagagatttgggttcaaatattaaaacctatctagccatagatgtagactttttattttctttttacacagcccagtagatggtaaacctagtgcatttaattttgaatctgttctaacattgaaaggccacccctatgtgttgctatacagaacttattactctccatttaagaataacttgttagtttcatatgtttaatagtgtgggaaacagtcataaacacaagttgtaggaaatgtaaaatactagaaacttgccacacgtcactgactgtacttggacaacctgtacattattatgtcctcactggctatatgataaagatatagatttctttcatattattttgatgtgtacattttaagactgcaattaaactatagtatgcttttgtaaaaatctatctacaaattctacatataaggatgaaattattaaaattaatggcaaaaactgcaattacttttgcaccagtctaataacttcacgctacagccacagtgaacactattgcaacactctgaatattttgaagtgatccaaatttatcctattatttcccaattttgtcttatgcaaatgaatatttacttcaaagatagcacacagaaaatttatcgatctaaaatgcacagccagataacacttagcataacatactatgttttatttttctttcagcgtttatcgtgattgttaaatcttttatttgctttttaaaaattttccccgtctattcccattctctaaccactaaagttcagctgtaagaccgtgggccacccagcagatttctaacaaatagctggcaaatttattgaattccactgaggtttagtcactaagtatgtgtcagacaaatgtgataggcagtgtaaaatttaaaatgtgaataagcctaacgtggtccttgccatcttgccactcattagatagcaccaaagaaagataaaatttagaaattgctggccacttacgtttaccataatagtgaagaaccatttttccaatggaacttaatagtatcataaagacttcttgtcataatgccttatgattgcccaactttgaagctctgaaaacctttccaaaatactttgaatagtataaaatggaactcttcacatgaaaaggaaagactgatggaaaatatatattttagcctctttatgtattacctagtttttaaggattataccatgtgaatatctaatattttgaaagcattcacgttatttggtaattacagcagcctaatgaagtataaaagttgtgtttaaaagggaatatttgaaaacactagatgaatggttgaggcatgggttgagaacaggatgtgaatgaaaatggacacacaggtttaggggttaataaaaaatgtcctaaagttggattgtggtgatatatacatgactctataaatttcctattgttcattgactatatgtttaaaatgaaaattttatggtatgtaaattgtacctcaaagttgtttttaaaaccctattgaatagagaatatatcaattactattatatatttaaaaagataatttaaggttaccatcaactttttcactccattattttgatgcatagcaaagggtgaaatgtgatgaatgttgttaaataacctggaattaacttaaatggtagatatttattgatggcctactgatgtccgcaagatcttacatagtaatatcataatgttcccattgtttacattctattccatttaatgaattttaatgctaaagcatttttactgaagctgatattttaactcagatctgctttctccactttaataattagccctttattaagtgaaaattaacctagaagtacaatctcccaattatttctaggcagcattccaaaatgttccctagagtttgatttactcatttatctattttgaaaagtaaccataattacttgaaaatacgttatttctattttcaatgtttgtaggcacgtagtagatgtataaacgttacatgagatattttgatacaggcatgcaatgcgtagcaatcaaatcagggtaaatggggtgtctatcaccttaagcatctatcctttgtgatataaaaaattcagttgtactcttttagtttattttaaaatgtagactcaaattacttttttattatggtcatcctgttctagcaaatactaggtcttgctcattatttctaatttttgtacccattaaccatccccacttcctccccaacccctgactacccttcccagcctctagtaaggatccttctactctctatctccatagttcaattatcttaatttttagctcccacaaataactgagaacatgggatgtttgtctttctgtgactggcttatttcacttaacgtaataacgtacaattccatccatgttattgcaaatgacaggacgtcattctttttatggctgaatagtactgtattgtgtataggtaccatattttcttttttttattattatactttaagttttagggtacatgtgcacattgtgcaggttagtcacatatgtatacatgtgccatgctggtgcgctgcacccactaactcgtcatctagcattaggtatatctcccaatgctatccctcccccctccccccaccccacaacagtccccggtgtgtgatgttccccttcctgtgtccatgtgctctcattgttcaattcccacctatgagtgagaacatgcagtgtttggttttttgtccttgagatagtttgctgagaatggtggtttccagcttcatccatgtccctacaaaggacatgaactcatccttttttatggctgcatagtattccaaggtgtatatgtgccacattttctaaatccattgtatcattgtgagacatttgggttggttccaagtctttgctattgtgaatagtgccgcaataaacatacgtgtgcatgtgtctttatagcagcatgatttatagtcctttgggtatatacccagtaatgggatggctgggtcaaatggtatttctagttctagatccctgaggaatcgccacactgacttccacaatggttgaaccagtttacagtcccaccaacagtgtaaaagtgttcctatttctccacatcctctccagcacctgttgtttcctgacttttgaatgattgccattctaactggtgtgagatggtatctcattgtggttttgatttgcatttctctgatggccagtgatgatgagcattttttcatgtgttttttggctgcagaggtacaaggaggaactgataccattccttctgaaactattccaatccatagaaaaagagggaatcctccctaactcattttatgaggccagcatcattctgataccaaagccgggcagagacacaaccaaaaaagagaattttagaccattatccttgatgaacattgatgaaaaaatcctcaataaaatacttgcaaaacgaatccagcagcacatcaaaaagcttatccaccatgatcaagtgggcttcatccttgggatgcaaggctggttcaatatatgcaaatcaataaatgtaatccagcatctaaacagagccaaagacaaaaaccacatgattatctcaatagatgcagaaaaagcctttgacaaaattcaacaacgcttcatgctaaaaattctcaataaattaggtattgatgggacgtatttcaaaataataagagctatctatgacaaacccacagccaatatcatactgaatgggcaaaaaccggaagcattccctttgaaaactggcacaagacagggatgccctctctcaccactcctattcaacatagtgttggaagttctggccagggcaattaggcaggagaaggaaataaagggtgttcaatcaggaaaagaggaagtcaaattgtccctgtttgcagatgacatgattgtatatctagaaaaccatattttctttatccattcgttttttaatggacatttaggttgcttccaaatcttgacttttgtgaacagtgccgcaataaaacacgggagtacagatatttcttcagtgtactgattttctttcttttgggtatatacacagcagtgggattgctggattgtatggtagctctgtttacagttttttgaggaatctcaaaacttgttttccatagtggttgtactagtttacattcctaccagcagtgtatgagggttcccttttctccatatcctcgccaacatttgttattgcttgttttataaataaaaccatttgagttgaagtgagattatatctcactgtggttttgatttactattctgttatgatcagtgatattgagacccttttcatatacccgtttgtcatttatcttctttcaaaaaaaagtctattcagatattttgcccatttttaatcagattattagttttttcctatagagttgtttgagctctttatatattctagttattgatcccttgtcagatgggtagtttggaaatattttctcccattccatgggttgtctcttcactttgtgggttgtatgctttgttgtgaagaagatttttaacttggtgtgttaccatttgtccatttttgctttggttgcctgtgcttgtgtggtatggttcaagaatttcttgcctagaccaatgttctggaggtttctcccaaagttttcttgtggtagtttcataatttgaggtcttagatttaagtatttaatccattttgatttgatttctgtatacggttcaagatagaggtctggttttattctgcatttggatatccaattttcccagcaccatttattgaaggactcctttccccaaagtgtgttcttggcactttgtcaaaaattaggtccctgtagatgtatggatttatctctgtgttctctattctgttctattgggctgtgtgtttgcgcttaagccagtaccatgctgtttcggttactatagctgtgtagtataatttaaagttaggtaaagtgattcctccagtttcattcttttttgcttaggatatatttggctattctgggtctgctgcagttccatataaattttaagattgttttttctatttctgtgaagaatgtctttgttagaaaatacattattataatgaactcttctattatcgttgtcgttattatgactaagcgtaacatcgtttctcaggtatattacaagtaataattatacacaatgtccaattttttatttttaaacggttctgtggtcaagattacgcagaaaaatttatatgctttacttctctgctggagatttttgacccacttttttgtattttcaaaaataaaagtttaacctaaatttgataagaagccacagacactttttcctccagaaatatgttgatataccacaaaactcatatgtcaaggaacaatgtaggggagacactgaaatagactgtttcctttggcctattgcatatttctgataaaagtcaaaacttctttagctgacaaaatttaatttaaaggtaatatttttctaagtaactctacttgggggggggggtttaaaaaaagagtagtacaaagctgtgtgaatttcttctttttttacttgttgaattattataaagtataacctgaaacttttcaacattttttttctatgaaaataattatatttcttgcattttcctatctttggaaagtacatatcatcccaaatcttttgatatattttgtttctttcgttttctaagtacgtgtgatatgtggccatttccctttcttgaaaatagcaatttcaaaattactggctctttcaaaattactaatctaacagtggtacgttcctccatcaatcagtagtctcaacatgaagtattttaatatcttttactaaaatattttcttattttctctaaatttttcctttctttgacaccacagaaactccaataattatttgatatcattttcttcattctgttaagtactttagcctgctgcagtataattttgctggccattttctgttactatatatatgagaatggtttgatgaggtaaagcaagattttaaaaacagccctgctctctgctcagttaactgtaaagtcctatatttaaaatgtgattaatgtttgaatgattttttggttctataattttgccctttaccatattcaatggaaaaatggttaattcgatttcacttgttttattttcctactttgaatatatagtgctgtgaacatagttactgcatgctcaaatgccttttttataatggaatgttgagataagctcaaatgtcttttttaatataatggaaagatgatataatttgctttatattacttgactttgatgaagaaaatctagtgattctgaaaggtactggattgagaacacctcatagagcatatgtgagtgttcacatcagtatccgtgatttgctatgtcctctcactttgtttccattagagtttactgattttatacgaagccaggctgataatttcacaagaatagttgtatgtggttggcttatttgttttcttcaaatgcttactatccatatccccctagatgtatatattaggtgaaaatataactcaaattatacatccctcacatctttaggacaacttagaaatctagtagacaagtagagagatcattttccttcagattgaatcttctatccccaatgttttcttccacaattttattttctttcatcatattctcataatgtcaaaaaagaaaatgattacattgtctttttttatgagtgatttttacataggagattgttcttcccagaagtttcaataatattctgttatttgtacaagttacttttctatttcacaataagcctgcgctaaagtgctaagcattttttacttatgtggttccagaatacagttctgacgaggttaggtaaagtagctggtaaaagatatcctaagtacaagctaaaagttaattacaatttaaatgtaaattttgtggaattaatgtgtaaagatgctggcaaatatgtgtcatgcatgttttacagcttacccatagtagaatcaattggaaatataaagacattttattttataattttagtaatgaattgaattattattaatgaatatgttaagtatatttgatagcctttttccaaatctacttgtatgatgcactctggcaaaaaaaagcaaaaggataacatctacaaagtgttgtatgattcttggatatacacaatatatattaataaatattctgagaagttctgtggtatagacacatgttcatcttcaatttccaaaatatgtttaaccactgagttctttttaatgcataatctactcaatgcataaagaaaattttatctctaatcatattggaacagtactacaaatatgcgaatttcactagaaatgcctatacattatgataaaagtctcacttttatatgatgttcaatgatgatttttttcaatgttaataattttagtggtggcgacctttctaaaaacacagaagctcatcctcaacagtttttctaactatttaatggaaatatgtatatttcaaattccatggaatgctttgccttgagctccaaattgcccaacattcctctcacaggttacttggtccttcatgtcccctgccaacagataaaagtcgagtgtttggttatatgtaagctgttgttgttcctattatttatgacttatgacaacaatatgactcatttgggaaaatgtggaacttatcaggaaggcctgtgttgcagtgatcacttacgctatctttgctttgctttgtaatgctgagcttctagaatttccaggggcagtctttgaaaaaaaaaattataaatagaaaattaaatgctggtttatagaagggtctcttgcaagtgagaggcactgaaacttaaggttctgtagcttcatactaattcctcatctagatagtaattcttactaactcacattcagtctttcctcccattaaattaagcacacacactctgcatgccccaagcctaatctttgctagcttgtttcctacagcctaaaataagatcctatattcttattctctgaccctccaaaaccctttctcagccatatgctagttaaatcatgtaaatttcctaaaaatcaccagattatacagcagatattaatatttatctttctgatcacagagcatgggtttttctgtttttaaaatttttttaaattatactttaagttctagggtacgtgtgcacaacatgcaggtttgttacgtatgtatccatgtgacatgttggtgtgctgcacccattaacttgtcagttacattaggtatatctcctaatgctatccctcccccctccccccaccccacgacaggccctggtgtgtgatgttagtttttctattacattgcatatatttctgctttgtaatttacttatatatctacagtctgcctcttaaaataaggcttctgtaagtataggggcaacaattttgttctcactgtgtggaattgagtagtagaagctgaacgatttgttgaattaaattgactaaatgctatcaacatacgaataagattaaatttctttttttctcacaaatgtccatttggaggatacttttattttaaaatcataattaaagaggcagtataattgttagagggcagcaagtttgttacttcctagttatgttaccttgggcatgttgatgtttctaccttcatttgtacatgaagatgataaatacttatgttaatatgattaggagatggaattaattatataaagtgttagcacataagttcccacaaatatctgtggtggtgaggatactgatgatgatttcttttctttttttttttttttttgtttttttgttttttgctcttctttgaccactctggtataaaaggttaaaggactatgtgtatacttcattttttcctctactaaccttggaggctaaggggatggaaaaacttttaaatacatgtacacagatatgattacagatgtataatttgggccctctaccctctctgagtgtattcttatttttttaaatcagtttcctttcacagtctccacaattgctattgaacttttatcactttgatttaaattccaccttgattctctcctctcatcctcagcagatacctagggttttgtgcttacgaggaaatgacatgttatatcgctgataacttataactaaatatttgtgcaaataacatggacaggtatttttacatatactgtcacatctgatctttttgaccaaaaccaatgtagttgactactgaagaaatgagaatttctcagataagaaaacttcattgctggcttgctattatcattcttgggctagacatgagaaaatcaaggttcagaacatgttgatgctttgcccaaggtggcaagagagagccctgaaatttaaatcctggttactgttaacatgatttcaccctgatactctgagagcaccatgtaggaagcattcaacttcttgcgtcttcacatcttacttttgttttctgaaaaagagccacctctcctcctgttgatattttccgttggccctgagctttgtgcttcactctggttttcttgctttaaacaggtttttttaaaatcaagtttatcttcttacatttaaaaaaaatcactttatgtgttggcttctttcatgtagccttaaagtatgttcaagtctgattgacctgaattttattatgtgtggagacaaaagtctgcaaaagtaatttaaactatttttattagagtgctccttgatccttaatcaggccagcccttgaaaatacgatttctgctctcgtcatccacttctctcttctagctgcaatggtcattgacgagctcatgtaccctgattactattgatcccattgaacctatctcaaactgtcactgttgacctctctctctcattcttaaaattctcacatcaattgatgtgagattttctctcttttctagttcttcttttctttctctttgactgttctttctctttatttggtgcttttctttccatgtcagttaaatttgtgttctccatggttctctctttgttctctctttctgctttcctctaacgcttgaaaacactgaaaaaatacatattatacaaatgtaccctgtttccctctttctctctgtacagacacacatagtgattattaaaatgcaaactcacttcaacatactgctgatttacagtcgcatttcctccctatgaatttccttagttatcggatcaaatattagcaataaaactactgttatctgtgattatgatcaatttcaaattttgaaatttatcttcgtgatcaaaatagtggtaaccattcatttgggacataaagttatttaatacctgatttctacctacatttcttgttaaattttgccaaactccttatgctcttcagtgccctgtctccacaccttgtctctcttcaaccagaaatgcttttgtttttacaactcctatatccttgcgtatccagtatgcatatacagtatttaggactctcatttagaagtaacaaaattgaagtaactaaagcaaaacaaatgagagagaaaggtttttcatatggaaacaggaatgtgtcatagaatccaagggcagtaataaagttttgactcaagaagggactaatgcctgtgttttggttatttatgatagccatttattattcccactaatggttttgcgtgttgagaaagctcacctggatggttctcttttgtggtttcttatgtgattttagtccattgttgtctgatactatagtaacctgaatgctcaactgggctgaacgtccaagatcactcattcacatgcctagcagttgttggctgaaagccttgttgtgattgttgctgaagcacttatccatggcctttcgatgttacttagctttctcagagcataatatgttggatggattctaaaagggagcaccctaagaatgactgttctaaaaagatagacgtggaagctgccaggccacttaaggacttttgccataactggcacttggactatattctattggtcaaagcagtcaaagagtcaacccagatttaaagagctgaagaaataaacttcacctcttgttgagggagtggtaagaggagcatgtgctgtgggagctattattgcagccctctttcgaaaatgctatctacgggctgggcacggtggctcacacctgtaatcccagcactttgggaagccgaggcaggtggatcacctgaggtcaggcattcgagaccatcctgaccaacatggtaaaaccctgtcgctactaaaaaatataaaaattagctgagcatggtggtgggcacctgtaatcgcagctacttggttggctgaggcaggagaatcgcttgaacctgggaggcggaggttgcagtgagccaagatcgtgctattgcgttccagcctgggtgacagagcgagattccatctcaaaacataaataactaactaaataaataaataaagccataccgcattggaagccatcagtgtttttgttaccacctcactccctatgcatctacttctttcttctctctctgttcatggacctttgctcttcctcaatccactctgcaaactagggacttcgtaagcacaatttgctagtatatgtgacacaattcgaagcactcacagtttgaccagactcttctgtcaattctaattttctgagagagattctgatgattctctcttaacacaagcattgtgtgtattctgatcacccataacatggagttggccagaattacgtggcacagacatggttgttactggcccacctttttgaggaggattaacatttccaagatgaaaggccctagccataacccctctaaagcatctgttactcccagcaatgcttactaattattgaaagttctactttaacatcaactcccttatgacatcctccgtacaagcatcactccaccctgcatacttccatccaattttatagattctgtgatgtttcttgctctataaataacgtcatgcacctagatggatccctactcccagattctaggttcacgaaacatatcaatatttctcacacaaggtagttattcaaccaatgaagatcatcgatatggtaataaaataagatacatttatatgcgtatttgctctcatttgttttaaggcagaattctaactatttaggtaattcataattgatttgcctctataattgttaggattaatattctaaggaataatattgaggtacatctgtgaatttataaccttgcataaggagctccttaaccacttagtccatgttcttggtataattctcattactcagttcagggctatagttcgctctggaaactgctaagcaaaactgatgttatcttctaatgatatgtatcagaatttactccaattggtgtaaattcacttacactaatatacgttatgcaaaatgatctgcatgataatgttatgggcactctggtataatttagtttctgctctaaattataataatctaataatgactgaattttaaattagaatgatttgaccgctagctgattttgtatggatttgacagaaataaataaataaatgtattgtgttcgtgtccacatgctgcagagatccctgcctataactggctcagaaattcatatgttaaatgcagaatatactttactatagaacttgatcgaaaatgtctttattgaatatataaatattgaaatgttttatagttatctaaaattcacaatcagtatctgccggaagccatcaaatatctatcagacaaatagcaatacctgtttggggcatttgacttccatttcttagattcatagcttccctgaaatttaactgaaatatggcacataatgactgagtagactacactaaggccaggcacagtggctcacgcctataatcacagctctgtgggaggctgagacaggagaattgcttaagaccaggagtttgggaccaggctgggtcacatagcaagactctgcctctacaaaataaaataaaataaaataaaaagaaggtaattaaggagtattttccacatgcaattttctcattatatctcatccctgtcacagttggctgaatcttacagattaacatcatgtctttggtccgatttgagtgtgacttcaaagataaaacatatcaattctacatataatatataaattacctattgaaaatgatatctgaaatagttgatattgactcaaaatgattattgcttttttcataataatcccatagggaagaaataaatcgtttcacttggataatttatgaaagtaaaaaatatttatgataattctatttaggtgatccacctgcctcgacctcccaaagtgctaggattacaggtgtgaaccaccactcttggccaatttacggtcattttaaaggaagctacatggtagaggtggttgaggagagtttctgaatttcgtcttcttggaaagttagttgttctttgtagagcatgctgactaataatgctatcctcccaacagaaaatccaatctgatttgacaagtcatgagatcagtttagaagaaatgaagaaacataatcaggggaaggaggctgcccaaagagtcctgtctcagattgatgttgcacaggtatatgttatttcagaaactaaggaacgtgttttcgttgggcattatactccagtctatattggacaacttgattattggcaagattggatttgaggacattatttgaaaactataatttgatgtctaaacaatgagtgttttgctctctacattttaaagataaaataggttaataaattaccttttatttagtataacattaagaaaaaactactgaatcattctcccaaatgtatgttttcctgtgttggatgaatggaaaaatactgctttattttgtttttatttttctgtatatcttcagaaataaaggcagatctatcaataaaaataggaccagttattgtttgaaaggcaaaattaaatcagtgcctttttacactgtccttacagaaaaaattacaagatgtctccatgaagtttcgattattccagaaaccagccaattttgagcagcgtctacaagaaagtaagatgattttagatgaagtgaagatgcacttgcctgcattggaaacaaagagtgtggaacaggaagtagtacagtcacagctaaatcattgtgtggtatgtatttctggtggcaaatacgcaggtaccccttgactttcctcattaagaagtaactgctcttttataagagagaattgttttcagataaccataataattatactatgtaattttaagattgagaacaaaaattggcacatgtattgtggcctattctgtgtgtcttttttgagtctataattctgctaagaactgtgcagaatataaaaggatgttgcttgtgtttaatttttatgattctttaaatatattttaaatggaaatctagaaaggaaatatattaatctaaaaatagtaacaacaacagtagttgcaataatcctaacaacttcagaaataatggatgccaggtaaactacgtgacatacagaagtcacctttaattcttaaggctacagattacctgagagaatttaaggacaaacagctggtgaatggcaaagcaagattccaattcaggtactcttattccaaactttaataactttcctttaaacaccagtactggatatacagtgaaatgcctcaagacaacaccgaattaaaaggcatggaaaggtacaaatagcctaaagtataaatctgatttaaactttataatattgaacggtgtcctatgttgctgttattggaaactcaccaactgagatgattcctctgaaaacaaagctgaggtatgattgcatctactcgagtaacataagtattattataactctacatgtactatcggccattagagtgggaagtcacataaaatgaaaacacagaatgttattaaagggaaaacaagtctatttagtacttgatattttaagtattgtttctacatctactccataatatcaatgaaaaacagagtccttcagatacatcgtagtcatatcatgaatggggaaatatttttctttttaacaaatatcttaaaataaatacatatatttatgtgtgaaaaatatgaggtattcttattcgataatatattttcataattcaagctgcattttagtggtataattactttaattattctcacccccaaaaagaaacttggaatagaaatgatagaaagtagttagttgatattagatgagtaaggataggaatatatgggaacatatcccatcttaaattttgccaaaaaaaaaaaaaaggaaagcataaatgacccaagtgccttattcatgactaatatttgcaaagtgagcacttttcgttcttttctagaaacaggtctctaatgttaccttataaaatgtatccaacagtaaatatgagctgaaaacaatctcacctgtgtcaagctgtgactgtgccctgcgtcagtacaaaggaaactgctcaaggcatttgctcaattggtttctggttctggtttaaatgtcaggaccaattgaagcagttctttcataagaatatccttacactgtttagttttttcattgtttacgatgctttgtggtgtataccataatcatagtcttgccttcaagacatgtttgtctatttataaaagtcttactttcatgaacacaaatataaataatatttctcccctttgtttataaatattttacttgcctattgaatgaaacaatgttaatggctaacggtaccttgagggaactttcttcatcaaaataaagcatttatattttttgaagttcagagagtaaataatttagaaaaatctctgattccaaattagcatcgttgatttccaacataataattaatttcagtgtttccagatacacagatatttttatatcttctaagaaaaaagtaaaatgaagtaaataatatcatctgggaaactcagacaaaagtcataattattagtgatgaaggaatgttaacatcatttgtcaaagaggattaatatggaaatatacatgtagcattgatcagataattgtccagcctttacaaaatgcttttttttagacattacttttaaactgaaaagagaaattaaacccaatttttgttctaattccataaaaacaattacctactgtcaggtttattttttggtaatactaaaataagtactgatagttcagatttatgactaaacaaattaaagcagagatacataatgtaaactattatatatacgtgtatacgtatatacacacacgtacatatatttgaatacatggccacatacatacaaagacatatatttctaggaaaactacaaagcaaaattaagacatcaagtggtgttggagtggtgttggtggtataattgtgaacatagctgtcttccaaagttatgacacttgtcttatgatgcttttttatagcaacctatgttttgtgaaaccgtatgtgtgtgctttatatttgtgatgtacatgtgaattgtcaataatatttttatatctggttttcatcagcacttttaagaaaataaagttgtgtaatttaattaacattgaaaaggaccttactttcttatatatgatacaatatatattgaaattatgatgtagaaatttaggtgctttaatgttactaatatgtaagtaccatgagaacaatagtgaatgtgtgtgttttggccaccactgacttcccagtgattcaaatactatctgattgatagtaaccactcaataaatacccgatgtaggagtgaattaattcatccaaatttatggctagaattatataactccaacatttaaaatagaagtcatgtaaaattcagaattgacatttatgttctttgattgaagaactaaatatatatatatcacaaaacacatatatatgattaactctctgtttaataagaatagctgcaaatgacacatatatgcatgtgtgtagacaattagaaatattaaatcaacagaaaatgcaaaagctagatattgaccaccgctgcaaaatgctactctattaaaatttcaaacatggaatagcaattaaggggatctctatttatttctgttcataatattatgaaataatttaactctactgattatcatgttttgttttatgtttaaacttagaacttgtataaaagtctgagtgaagtgaagtctgaagtggaaatggtgataaagactggacgtcagattgtacagaaaaagcagacggaaaatcccaaagaacttgatgaaagagtaacagctttgaaattgcattataatgagctgggagcaaaggtgtgtgcatgctgagaccacaaacacttctttccactttccttataaattgtaaagcaacgggcaataaattatgtatgattagagtcttagcaattctaaacacctctctctctctatgtatatgtatacgtatatatatacacacatatacgtatatatatatatgtacacatatacacaaagataaacatatacacatatttcgatgtggaattctcattaagaaacaataattaatcagtgaggctctgcttattcagattgaaaaatacgtaacgctcagggaggtttttcctggtccatcagatagctctaaaagggtttcttagttgtaagtgttccttattttcattatatatatctacttgtgatgacttgaagactggtaaatattataaactgtatctatttatatgtaggtctaatgttgttaacatattccacagagaccacattaagtttaaaaattacacagtaattatttccctatatggccaagacttgcaaaatctaccacacttggctaataagatagcatggatagccagttaagacctacgtctctgtaattatttttgtatcattgtcctgatcagagtctcatgaccagctccacttcactgctaattcaagatgcctatatctctccatctcacttcgctcaactcaaatattctgtatagattatgatagtaagtagtctcttcactctgttgattgtttgttttgctgagcagaagctttttaggttgatgcgataacagtcgtctagttttcctcttgttgcctgtgctttgggagtcagatccaaaaaaaatgtttgcccagaacaatgtcaggaagctttttcctgttttcttcaaatcattttataggttcaggttttaagtcttgagtccattttgaactggttttttatatgctgtgagataagtgtccaattgcattttcatgcatttggatatccaatttctcagaaccatttattgaagagaatgtccttttttcattgtgtattctcggccccttggttgatcagttgatcataaatatgtggatttattattgggctctctattctgttcctttggtctatatgtctgtttttatactaccatcctgctcttttaattactagagcattatagaatatttttgaatcaggtaattatgatacctccagcttcgttcttttggcttaagattgctttggctattctgggtcttttgttgttcaaaatgaaatttgggattctttcttctacatctgccaaaaatgtcactggaattttaatagggattgcattaagtctgtaaattgctttgagtggtacagacatcttaacaatattatttattccaatccatgaatatgggatatctttccataaacggatatcttagtatttccaaaaatggacttctaacattttaatttcgttctgactgaaagaactgaatttcttggaggataaaaagttatatttttacaactcaggttctcaactttagtgaatagaacaacatcactgataaaattgtcacctcatcttagacagaaatatgaatgtccatgtttgagaaatagctaaggagaggcatatttcttgcatctcagcctgaaagtagattgaaggttatatcttcaagatattagttgccaattccttaccatagaaagtaaattttataattaagttgaaatctggaagtaatcatttttcttagatagtcttgtttttatattttaaaaaccctctaattaatatttgttatgttttaaacaagtttgttgccatcctatgacaaaagattctcctactttgtttcaaaataagaaacactgatactcaattgatgggaaagcattatgataatcttgaaataaaatacatttcaactgttcatttggtctaccaaggtacctttggaatgagatacctttatatcctctagagaaatttatcattgtttaaagatcaccacagacagaaaaattgtatctgcacttgataccttattccggtgcttatcaatttttatagatgccaattatttcatatttaacatcaattacgaaggactgagtaatctctagtctcaaatgtattagagattgaataatctctaatattaatcctaatgctacagcttcagttctggagatatattgtttttgtaattataaattttaaattaataaaatgaatgtatgttatagttataaattacaaattttcagtttataatttgacctgtgtgactttatactaaaataatgtatggatgagtattttttaaattaagaaaatatatgttttggtaaaggggagtttctcagtttactttttaaaatagaggttttttgtgtgtgggctttttatttgtcataggaatttttacgaaatcattgcaagagtaaatttaacataaaataacagaataaatcaattagaatttaaagcaatgaaagtgacattagacgaataatagtgccctgagttgattattattcagaaatgaatgattctcgtaatgatgtcaaaccctatttattcctgaaaatacatatctgagagcttgtgtttattctaaccatttgccacatagtaatatccttaaagcaaaataaaagtgtatgaagaaatcatatttaactttaatagtatcacagaatacagcaaaaacataggccaaacatttatttttgaagtaaatattgatgtagaaacatttgtgactaagggatcatgtataaataccatcttataaaaatgctgtaagtcctatattctttgcctgagaataaaaatattgtctggattttgactcaaaatattttcaacagcagtagctttgtctaatgaaagcaaaggcaacaaaggaaatgttattacattattctttttatgtaagaaggaacccttctattttaaccatcttcagaatttatatggttgtgtctgccacaattgagtatgcattacctttttggagtaatcagctctggctgccataacacaataaaataaactaggtaaattgatttctgcaagtgtggagtctgggagtgcaagatcaaggtgctgatccatttcattcctgaggagagctttcttcttgtcttacctttttgctgtattcttacatggtgatgagtggggagagaaaatataattaatttattaagagatattaaagctggcaccattgatgtaataatacctataacccctttttatttctctatgctctgatttttatggaaatttacataaatagcaatactaatatcatcccttaaatacattgttaacttcgtgaaacaatgactactaaaacattttactgcaggtggcattgtgttaaacgtatccattcctcgcatacacacacaaagtataaaactcaattttccttaagatggcagtgtctcctgttttttaaaaatgtatttagctggaaataaacaaaatgaaataaataaaaatcaatactgcattagctctgggaagatagaatttctttgaaatattgaatctggaatcatttttctaccaataatgcataggaaaaatatgcatagaaacacaccataaagtatattttccctcaccccccacacacccctacaacacaaaattcttgcagtcaaaagggcagatgcttttacttaggaaaaaaaaaaatagaagggaaaatctgtttaaaaaatgaatttacagcctcagcaactaaatgttttctaaatgtacgcacacctctcctaaagaaaataaggaattttattatttggaattggaattgttatcaaggttccagaatatttatttcgattgtagcattttagatgctttatacatatttttatcttttgtgtttttcttgcttatagatagattcttattttggttgtacacacacatacacatagacacacacacacatatatatgacataaatatatgtatcagtcagtggtgcctattgggcttagggcataatgcacaaataacgcacttgtggtggtggtattgttttaaccaattccattacaattgaaattaatctggagtctacctttcagatttcttagcaacaaaagccaaatcttgtccatgttttatttacctgtaaggtagtaaaataaatgtaaataaagcttttgctctatacattcaggcacagttttttattgaaccatccctaaaggtaaataatgagaataaaggaagggattgaggtggtacaatatgtcatgctctctcaaactgttgtctgcctttaccctcgcaatattcctgtgttctattaataagtatagtaatcccatttgacagatgtgttgagaaaaatgaggtgttctgccaaaaatcatactcaagtcgagagtccactacgtatcgcagagcctaacatacttacattccatcatgctgtttctgcagagccaaatatttatatctattgttcagattcccaggcttcatgacagacaagggttttttttaaaaaaaggtgaaaacacataccaaagaaaagaaaaccaggagcaacttgtaagagtataaactctttatgtaaattctaccagttatattttctaacttgtaattaacgatttgcaagtcttcattcattcctttattcaatacataaagcatatttagtgagacctttctttgttcaaggaactttcaggagtagagaggagtaatctaaagatgtgtgaggcaagaagatttgcctttaagaaattgtaatttatctggcttttgttgatgatttgactgcctttagtagaaagagatgctgggatttttattaaaccaaccaactgaaaatcttaacaaaatataggcacatctgagaaggtggtggagaaatacagatttgttcatttcttatgtgagaatatggataatttgcttttgagggtgttggtatcaaacactgagaacaggagcacaggatcaagtaattagtttttctattaatgggaatgaatattgtcttcacattcatctttttgtccctattggatggcaaaattatgtttaaggaggaagtgacctattcactgtattgtttttgagcagatgtgagacactttaaagatgtaacgaggatacagttgagaattctaggtattacacaaatacttttaccttttgagagaattaatcttctatcttcattttgattccttaccagcatgagctagtctcacttgtatatagaggattgtaaaccttcttgccatattattgacacatgacagtaagttttcagtgagaaatgagttttatcttcagtttgacttatatcattgtatttatcataaactttggctataaattatcttagagaaaaattcgtataggtttcttttctaccatgacgacatacaagaccctatcttttggacaaacgatgtcatctgccctagacagtttttattcactcttaatattcagaatatatgatttttataaaatattattttaaaacgtgtaagaaaatagttattttaaataacagaaatataaaagttccaaataagtggttataacgaaatttgaattaaagagtaaactaaattacatttcattataattcttttcaggtaacagaaagaaagcaacagttggagaaatgcttgaaattgtcccgtaagatgcgaaaggaaatgaatgtcttgacagaatggctggcagctacagatatggaattgacaaagagatcagcagttgaaggaatgcctagtaatttggattctgaagttgcctggggaaaggtaaaacctatatcactgaaggttattttgaacatacgtgaaaacacataatatgattttgtaaggaagtattaacatgtagcaataatagcattataaatattaatattgtttcatattccctttcttaaaaattaatctgtgcttttcaggaccatgataaaaccaatggtaagctttagcaggagtctctccaaaagcttccttagagttcagtaaattatgaataagaccttaagaaatacataggtcattagtctgaaaattggtccagagatgagatcctataatgtactggcttgcctaagaccatactgcccagatgaatcccacagccatgaagagggcaaggacacagagattgaagacagttgggctggacaggacttgcaagattagcatattgccaaagtcgcatttcagaaagaatctcaaggtgtctatgcaggggctatcatttccatcaccaaatgacacagcgactcctgtaatcattagccgttaaattcttgccctttctctgatggccaatcatttcatgctgcttagaacttagtcaagagactcatagcttagtatttttttttttactgtttattcattaccagattacctgaaagtgtgttgatataaagaaaatagctgatattgataacatgttttacctcaaaatttgccactgtgttaggccatttacacccacttaatgttttaaagttaccaaattaactagatgtataagacgtttatactttatttttaattcaatgtggctatccagattattcaaagttgggaaattttcaataccttatgtaaaaacttacaatcgtataaatgagacccaaactgaaaactgtctttatgtagattcagagaacaagtagtaatatattttgttacataaaatatttccaaataaatagtagggaattaaattgtttttcttctctttcagaataaatgtaatgttagataagatattgaattatagttattcaggatcatacatgagattactatagcaaggaagatacagtatatacaggttaaaactcacattagccttattttttcttatcattcaaacatattacttgaggtatttttgcattagcctcaccatgaaatcattcaaatgttataaggtaatgacctttgcagaggtttctaggttatccttctcatatagaaggcttgaatagtctggagaattgtctgcttgttgaatctgcctggaaagtatttttcataacgtcaaggagcaaagctactgtgagatctagtaggaaaaaaaaaaagcttagaaaactggcatttattttctttctttatagaataaagataatttatcactctatctagatcttttcaaacactaagctgttaatgacatactctaaaatctcttagttgtcaaataaagtatattcatttgcatctgaattacagaacttttttttttttttaccaatttatttggaaggttctcattatttctttaaaaataacaatcataaaagaatatatgccctgcagatctaagccagtcacatttatgataatcattctaatattttaacataaaattcaaactctcatatatgaaaccccgtgactattgagtacattctcatttctcatggtttcttggtaggtggagagcttaattcaagctataagtttcatctgctgtttcaaaagataaatgtcacatttttaaaaactaaattaaattcatttaaatgcaatacattaaatgtagttgccgatcattccaagtatttggaatgtgactgcagcaaatttgaatatctagagtcaatttcttttttattattttaaaaaatttttagacaatttaatttatatctgctgaatttctcccagttctgttgacccaagaacattatatttattttcgtatgaaagtatttgaacatctagtttcaaatattcaaatacataaaaatgtcaattactcatgaagtgattttttgacctttagtttatccaaacaaagcataatttcaagtacattgactatagttaaatagtatcagttttatcttaaagtatcttaattatatttaatatatattaaattccagaaaaattatttagtgtggcttgaagagatacatatggcacaacttgagaagcctaaataaattggaaaactaggaaaaggaaaattatagtagataaataataaaaaattcttgcatagaaatatatccacaatgtatcatgggtggtggaatggacagggaacattttaaagccacaaattggcgccaagcttcctaaaagacaaaaccaagaagtaaacatatttttgagacccaaagtttccaaattattaaaataataattaaaataattttaactttactagtagtatgttagctttttgctagaacttagtgccagaagaaaataaatgggagggtcataaaggtgataacacgctgattcatattcttataataaacaataagaatgtttatttttttctaccaacatggctccatgaaaaagaaaaatttagtgctaaagggccattcaggaaaagcaattctatgagaggaaaaaatattggagcagaagtctaaagtagtctagcaattgttttcagattttcagattctctattttattaatttttaattttgtatggatacatactgggtgtatatatttatgaattataggagacatttttatacaggcatgcaatacgtaattgtcacatcatgtaaccttctgtgaatatgctttcctgcaactgagcttttaagtagaattagacatcagagatttgaaggttatttattttctctgaatacagaaaaaaattttctgtatctttttcctggaaagaagccagattgtttctaactgagaacacatttctatacttggccctatatctaattggaaagcagggcttcatattcatgtgtatgtcatagtactagaaggcttcaatagctaaaaatttttgctaacatagagttttgggtttgaaccagtcacagagaaattggctattgagccttttcgtgccaagcataattgaagaaagaaaactcaccatcgacaactcaaaatatgttgacttctctaggaacctgtatcaatctctcagtgaatgtatttatttgaaaacacagttgggctattactttagctgtaaaagctattgaaaataaagctcagtagtactctcttacttgatgatggcatttaaaaggtgaagtgagaatgttttatagggggcatgaagtatcaagtactgagtgtgatgaaaattaatatactggttaatgataatactgagtctaaatgtactagtttttcctgtgatatgagaaaactagaattcacttttcaagatcaaaattagcaaagaatttggaagtattgctccaattggagaatcagaagtcaccttaaaaacaatacagattttactaatctatagtaatatatatttcataaagtcttcatgtgacacaaaagttttagggttttggtttttaactagccgtgttatataatcgaggaaatttcctatcctaaattagaaaagtataagcatatttaaagttcaattcagtttttcttacattacgaagctgagaaaaatgaatctaacattaaaatcaaaagcaatctggtctggcttactgtattcatgtcaccaatgcggtttatcaaaaatccctgtcatatcaaatcaagcccttccacaatgatctaacacttaagtttttatgagaaaaaaaaaaaattggattctctatactcatttcacctccttaccgtggctgtgggcaggccccagatgatgcattgtctataatataaactatgttggtgaccaccaaagcagccaggcattcttgctgttccttcatttcttactagattatgttatttaattaatttaatagtatttcatcgcctatttatagggccatagtccatgtgcaagcagttttccagtaccaccaaaattctcaataaggtcccatcacaactatcatttaggcctaccataaaatacacagaattaataaaatgagacaaccatcattgtgtgagcaatacttaagtcagccccatgcaccttcagagaggtactactagcattgagatgaattattccaacttgtagggaaaccaaatagataccgaaagaaagagtttattcttatttatttattttgagatggagtcttgctcttgtcaccgatcctggagtgcaatggcccgatctcggctcactgcaacctcctgggttcaagcagttctcctgccccagcctcccgggtagctgggattacagacacctgccaccataccctgctaattttttgtgttttcggtagagttggagtttcaccatgatggtcaggctggtctcgaactcctgacctcaggtcatccacctgcctcggcctcccaaagtgctgggattacaggtgtgagtcaccacacccggccagaagagtttcttacactggccaaaagatcagttatgttctttataaacttggcataggcttagggggcaattcaccatttgttttctaatgctgtgccctttaaaaaggaaggggaaggttgcctaaaacgatgaaagagatgttataaaaatcaagcttcttgagaaatatagtaaaattggaaacaccttaaatgttgcagtgtgttaccatttacacaaaggataaaatatgtagaaatatacattatttagttatatataatatatagtaaaagcagaaagatgtttgggaattaatataaactgaatacagaacaagagctatctctgtgaggaaagacaaaagaattgggtgggatatgaacaggacacttaaatgatacttgtaatatttcattccttaagatgagttatgcatacagaagtaatgattacatttggtatactttctgtgtgtctaaaatcacatataagaacataagaaaacatacaaaagcaaatgcttgggatttttccttttggaaactccactagccaggttctgtaagataacgcttagtaattaaggaacacccacttcgtgagtattattggtttcaaaagagcatggccactgttcattcggtttgcctaagcattggccaaagattctcctgctgattgagcaacaggacaggaacctagcagattaattccagcgagatgaataaggaacattgtctttccagtttttaaagaggatgtttctgtggctttttttttctttattatctacattgaagcatgatcgacagattcttatcaatgatttccttgtgaaagcagagtcaagggaatgaatagcgcaaaccgagaactgagaattttcatcaaagtggaaccaaaagttagcctgtgtatggtcagtttgtgtggcagcagtgctgttctatccttaagaacacttctattcagagagaatcgttattagagaggacagatctgtaagtcactgggtgaggtaacatcagaactgaaggtcctctgaaaatgatcttatttccctttttgtaaacaagaaaactgtgcaaaaagctccatatccctttctctgtttctcgattactttctttttaaaattactttagattcaggggttacatgtgcaagtttgttacatgggtgtattgtgtaacaattctaaaattcatatggaaccaagaaagggcctgaacagctaaagcaatcctaagccaaaagaacaaagttgagggcattacattgccccacttaaaatatactacaaagctgtagtaacgcaaacagcataatactattacagatatagacacctagatcaatggaacagaatagagaactcagaaataaagctgcacacctacaaccaactgatttttgacaaagttggcaaaaataagcaacagagaagggacaccttattcattaaatattgctaggatagctggctagccatatatagaggaatgaacctggacccctacctttcaccatatacaaaaattaactcaagatggattaaagtcttaaatgtaagccctgaaactactaaaaatcctagaataaaacctaggaaaagttcttctggacactggcttaggcaaagaatttatgaccaagacctcaatgacaaatgcaacaaaaacaaaaattgacaaatgagagttaattaaattaaagcttctgtacagaaaaagaaacaatcaacacagtaaacagataacctcctgaatgggagaaaatatttgcaaactttgcatctgacaaaagaataatatccagaatctataaggaacttaaacttgtcaacaagaaattaaaaaaaaacagattaaaaacaggacaaagaacgtgaatagacactcctcgaaagaagacatacaagcggccaatgagcatattaaaaaatcttcaatatcactaatcatcagagagatgccaattaaaccctaaataagataccatctcacaccagtctgaatggcttttgttaaaaagtcagaaaataacggatgttgattgctttcatagggtgaccatgattacatttgtaatagtcattcactcctaaggatttcaaagtcatgtgggtccaggatcctcaatatgaggattaatgttaccatgggaaccatgaaaagagctgacctaataggggccatatcaattctagccaacttcttgagcttcctaatagagaagaatgcctaagagactctctcaccaagaggaaggcaaattaactagtcagataaatgagagcagagatgggcaaactataattggtaggcctaatccattcagccaccttcttttgtacagcccatgggctgaaaattgtttttatgtaaatggttggaaaaaatcaaaagaagaactagatacttcaggacacataaaaattattaaaaatgcatatgtcagtgtctgtacataagactattgaagtgtatcaatttatatttgtttattttttctggctgcttttgtgctaaaacagcagagttgagtaattgtgacagagactgcatggctcacaaagcctagaacaactactatgtggccattcacagaacatattcaaactcctgaactagaggaaagctaatatagaagcagcaccctgtttgaccatagaattttgccatgtcttcttcttgaatgagtatcagaggtttgacatttctgggatccttttgataggccagtggcgttgtagaattggtctttcctaaatagaatgattcatctaagttttcttcctgctcagaattaaatagtaacatattccaaaccatagatactagaatgcatagcccttccaaaagatactgggtggtgcgtgacacaatttaagatgtttaaagataccatctacttgaagagaattacgaactcaagaatgtcttaggtattctaattcttaatgatcccacagagaaagaatgggagaacttccagaagtagtgaggatgtggtcaggggtgattaactgaagggacagctgcaggtaagaaaactgtcctgtgtccccttaccctgtgaccatgtttccaaattatagttacagaaaaaaagaatatattttaaaagtattccaaattgtttaaaaggtaaagaaaaatttttaaattaaaatgacaggaggaaagccatttgagaatattaacaaatgagataaaagattgatgatgaaaattgacaatttaaattattaatgctaattgcaacttcctacagcgacatagccctttcactgtatttttaaattcacccttcaatcagagtagtattaaagagggtaaaattaatgttaagtttttaaaaatatggatcaatcctagctagctgcatggtccagacaacagcaatgccacgaggcagccatcacagtgatatttatcaccccataaatgttcagatacttttccttttctgttaatggaattttctaggctgaggtgacaaacactgatagctgtagaatagagatgatggaaggaaatggcaaggcaatctacaggagattactagcacctgaagagtttgaatactggaactgcacaagttccttgagctttcatgataacccctactctcttggactgttatgtaggcaatagtaattcattcagcaaaaggacagggaaaatgtgtattttggtctctgatatttcccatgtacataagatattgcctgacacataggacatactcatgaaatatctgtttaaacgtaacttgcaaattaagagttgcaaattataatgacaaagcagttcttgagagaagagaaaaatgctgatttacatttaaaattgtacaagttttataacaaacataaataatcacctgatcaaatgttcccgttttatagatgaacaaatacaagtcctggtacatagcaaaactgtaatactatgcctgatttcaacagttttttccactataccaaattatcataagaagtcttattttctagtaattttaaagtaatctaagcttaaaataacaaaaagctacttattcacaataagcatgaaacaaaccatggctaaatttcaagtgcagaaaatataagtcctcattaaaataataaaatgaaaacccgtgtgtatctatcacctactacagtctgtagtctgtccccactgttgtgattttagatttcaaatattgtttgttagtatcttaatatcactctgattagttgagtgtaagtaaatcaatctgaacatcccattactggccaatattgtttagcatatgaattgatcacgaaaacataaccataggaaagtaaatatgtatgtgattaattagaggtttacttccctgaagatcattatgtttgggaaatacaagctttgacaaagtctaatctatatgattttctgatttaatcactaacattttatttctaattttgttttaagcatcaaagattccaactcagttaaataatttagttccattaaacccctaaatatccatggtgtcatctgaaagttcaaatggtagaataagattttctggaaaaaaaaaatttggtcctatagtatgttcatcctaccgcctgttttattaacagtagtcttagtatgccaagagttgcctgagaggaacacacacaaacacacacgcacacaaatggtattaataaatttaactgaaggtgttaaatgcagaataatctatgtctaaatagccacttgtttaacaaattaccgtgtttttcacgtttattttggaaacaaagttttataatatttaacctcaggaagaacaaacattggttgctcaattatcctttggctttcagttcactcttagaatttaatgactatcactcaataaaaactcagaatgcatctttctgtttgcctgtggttttcaacattggttgcacatcaaaatcacccgagaaacttgaaaagtatcccaatgtttggggcccacttccagagattctgatttaattggtctaactctaactagctctcttattcagcaaagttgagaatcactagataatgtgatacaagatccgcgaatttcaagctgtctgacgagagcctaaattcagctcagtcaaccatgtcttgtatatatattttttataacagtaagatttcacagtttaaagagatctggtttctggtcctagattatctggataactgcctcaactcatcattcctcttagctataaaaatataagaactattacttactctaaagtctgttatactctcattcccctgaaaaattacgtatcttttttttttaaagtgagcagagtaatttatctgtgaagtgaaataacactagcagatcattaacttggtgcaatgaatgcatcaagcagctgttacttagaaaatagaacatctgttacatgccattggagtcactattcactgtcattatagttagagctgttatttctgttcagttcattctgctttcatgaaattcttctttaataaacaatacagtgttattaaaaagtcaatacacattgctatagaatccactatttaatgctttatgttctttttgaatgtatcattatattattctgtcacattagcctaatagtaaaatatgtcctaaacctctagccatgatagagtaattttgggggctgtaaaagcaattagcatctcatttcctcatgtttaagacatgttagattgtgtgatgcaccattgatatgattacagctgctgagaatttaaaaaaaaaaaaaaaaacactaccactttcaaggtaaaccttaattgtatgttacatctcaatttccgaatccttaaaatgtgacaaatgcacatcttagaattgcagtaatatggcaatgtattccttttctttccacgaatatgttacgtagctaaaaggtgaaagaaccctctcctgttctctgtgatcagaaatggtataatatttgcaaatactaagtgcagaattcacctgggtagggggacttctcaagatgccttttatggatgctttagttagccttttattcatattacagggaacatgagtaagagaaaggaatagctaaaataagtctgaatttaattgagtcctagtaaagggaggaatctataaggaaatgatgttaaggtacgtaggtaaataaatgtggtgctgattgaagataagctctagagaacaggagactcttaagataataaaatttgtttaaaaagagggggtggaaaaaagagatcagacagagaagttatcttaagaatataagtccctgagaaattccaagaaaatctgtggaaggtactggaaaacttgtgaaaatacgaaatgggtggaggagagaatagaggttaagtgagctacatttctttacccctgaagggaaatgtttgtaaaggtgttcctataggaccagatgatttttccaataatttttaccgttctaccattaaataaaaataatgaaaaatgctgatggtataatcagcagagaccaatggagaaggtttttccatcttgctactgtatcagtgaagtgagccgatagctgaaccctgaaccgaacatgcctttttaaatttctacaagcaattatacttgtagatatggggaatgaatcagaatgtattcttcatccttcccatcaacatggggcatgacttcactggaagaaattaactcattatactcattcttttataataaggaaattagagtagcatttacaaattatggctaagaagtagacagcaaatttgtttgaaatcatggaagttagtgcttagtatttggactatttatactggagctatcaaatgttacaaagtaacatatggaaaataatatgttagacattgtgagaatttatagtttaattggattttacttatgtcagatattttcccctctatcataaaaacccttagtgccaagtatatagtttgcgttcaccttctcttgaatctcctgaaggtggacttacaatcatgtcataggtcaagttaaaactgagtgtacacaatcttgctttttcttcagccctaaaatcgatcctagcagcaatcacattactacatgactgaaaaacctaaagtgtctgagttataatttagtgaatttagtcattgaatttgaacttgctccttcagaagagtagatcttctagaaccctctccacttctcacctcacaaggcagaagaaggcatgtatgctgagaatcggatgcttttgaaaaggaggaaatgccatatcttttcagctgtttctttccatctcgccaaccctataaataaggagctccctttgagaggaatgagtacaggtataaagacaatggccaaggcaatagctctaggttggttctccatacatctgaagatgcagacattcttgtgttgtgggaaactattagagccagagaaaatggttcgtcaacaacctcatcaaatgtattcttttagtttacagtaagaattccctgttcctctatggcagccttgtattctaactttcataccttctcgttgcttcgtactttgtctttagtcaatccaaaccatcccatgcacactccgccttcaagtgtcacctttcccttgtagtcattcatgcttattccagccatggctcatctgtttccaaaaaaaaatgtgatttttttctagtatgatatcaaattgttttattgcatttaagctttcctctgcagctacactgtaggcatgattagagtgaggtttgcaaagattacctcattcctcatctctggcagtgaatagcacagtacagactggatattaggcacctgatatacattggtcaattagtatttcagatctccagaaagcaagctcagcatagtatttaaaggctaagtcttatttaagtcttatttcttaagtcatatctttgattaaaaacacatttgagggaaaaatttaaggcctactaaattaacacaatattttttcctaacccaaaacagcatgtatacaaatgattgaatactggttccttattgttgaatagcatacataaaagtttaactctaggtctctttttttacagagtgtaaattgtcctgtgaatcacttttgaccattagcagttataaaccaccatcatatcactgcttttttcaaatacaagttgataatggtgataaattgaacatcttttagttttaatttataattttgtggaacttaagaaggcactagaaattagtccacatttcctattttgttcccatcaactgaacatcactggacattgtttaaattagctggaggaatttggccagatgttgacacataatggtttctgtgacccaggaactacctgcaacattatcccctaagttcaaaacttttgtgatctcttctgagttttggaaaattccattgcctttaattgcattgcttgtcatgtaagaaacaaaatctatgtacacaataactttttacattgatgctaaaatatagtgtcatctttatgaagacttattaagagataattagtaatccaaatataaattaagcttcaactttgtgaagggttacctttgtgaataaatcaactacagcgagatgccagtagactggaatatagaaagtagataattctcatttgcgtatatgtccatctctttgacaaactcatacttggatataagtttttgaaggatggggacttctctaccgttttatcccacagagcctagtaacaatggctaacatctatggttgtagaggttgtatactacaaaaggttgaagtcaaagtattaaaaggaataaaatctagtctatgtctactctgaagttaagctctaaagggtctgtatctacccaaatgagagacttctaataatctcccagaatatattgaggagaattacatatgattctgctacagtagtaactggcatataataggagctcaggcaacacttacgattgataaatgaagaaattgcttttatgaattgctaagctcacctgtgtgcaacaaatagcacctacatatgaagaaccccatgcatgatagctgtcgagttcatctggcattaagtaccttaatttcaggcatgtttttattgaaaaaatgtgacataaaaccatatcttagaattgaagaaacagtgtttttgtcttgcataaaaatttttatacattgtttcctcatttatttctcctgtttatccgatgccaaaggcaaaaccaaaacagaaagtatgagaagtgatttcgagtggaccaggaccttatggcgtggcagaaagacagccacaggactacttaggtatattataaagatagaaaagacatgttgagagtgactctatgaggccagcctatacctaatttcttactcttgtactgtaatttttttcttaagaaattagatgtaggctggcattacagagctgctccttgtgtgtttattaattgattatttgtatctggactttctccactttcctgttattgctgtttctcaatgattttgttttgctttggctttctgtgattaagacatcagctccactcgcaaatagcttttcaactcgagtgccaatcacagtctctgtatctgttaaccttattgagaaaggagaaaaagggtctgttgggctctggctcagctctctgtgaatgtcccacagctggctaactagacaggcagggaaagaaccaggcacagactcagtggaatgccgagtggccacattgtctgtcagccgtgccatgtaccaggaaaggggctttatgcagggcaggtagtaaacctttgtactaagatcactttttccatcactactctctatcttttttcatgttaaatgtgattgttttcatgttttataaatcacctcttaggaaatagtggtattctcttaggagattttagtctagggtatgtggatagaaataaggtctgtgaacttggattgggggaaaactttatctttatttgtattcaattaaaaccaaaagtaagcagttttttcagttaaaatgtgagcaacaaactccagcaatagagatacccatgactttgtcactaatagaaatgacagatacttttataacgtgttccagacattgtacatacttaaaaataccagttatgctcgtcatcactacattgaaattatcctaaagacctgatgctagatcttgttaattaacatattaggaaataaaacatgtattactacatcacaaatatttaaaaaatgtgttgcacattgtatttcagtataattgttttcatttaaaatcctatgtattttgttttatgcatttaaaagcattattatgagaatgggtttttaagcttcaacagatgccaaaaagatccatggcactaaaaggctaaaaaaatccctgctgcagaaatacagtagcaccatactgtagaattttctaagggcagtttcttatttgtggatggattttcaaatatctgcctttagccactacatgtataaattaaataaatataaatatatttagttgaacaatatgtatgtttattaaatatttataatgaaaaataagacatgaattatgcttatgtacatatatatgttcatagttacccaacaatgaagcttcagtatatatggtatggttttcatgattcattaatacatagttataggtttaaaaccttgcagaatcatagtaaccatacagaaagccgtttcataagcattaaatcttaagactacaagacattacttgaaggtcaatgctctccttttcacaggctactcaaaaagagattgagaaacagaaggtgcacctgaagagtatcacagaggtaggagaggccttgaaaacagttttgggcaagaaggagacgttggtggaagataaactcagtcttctgaatagtaactggatagctgtcacctcccgagcagaagagtggttaaatcttttgttggtaagagaaaaggctagaagcttttacacccttctctgtcacgagaaaaagatacataagtgaccagtaacaattctgtgtttgaaaatttctcaattctacgtatatgctggctcttaattcaatatctataacaatattttaatatatttttctttatatttacgcaatattctatatgaaaataccacttaaaactaatctcaatgaaactttattgttgtcttttaaacattttagaacataggaaaaattctttaagaatattgtctaaccaataatgccatggtatgtctctgtacaattaaggaataccagaaacacatggaaacttttgaccagaatgtggaccacatcacaaagtggatcattcaggctgacacacttttggatgaatcagagaaaaagaaaccccagcaaaaagaagacgtgcttaaggtagcaaataaaatatgaaaagtaatgtccaaattgtacaccagttacttcaatcatctttgtcctaaaagatactaaggacgtcttaataagagtaaaacaatcctttcttccttcctttatctttccctttttccttccttccccctttgaatggaaatgaatgattttgaagagttctgtaatctgactttctgttcaaatccatcactcagttaattatacccaatgtaaactccgttcagaaagatattccaagatttattttgaaatcatattgcaaatttctgcctttgtcaatggtggtactacattcttgtgtctaacacaaagaacaatctgacactatcattcatttagcccatctgaatgaacacctgaaatccagtcagctgatttttttgcctatgccatatccaaatcttggtaattagtcttaatgttgggcttatgtaaagctgaggttttcatttttaactacatgtaaactaggctttgggttctttcttttagtctcaaaactgactgttaggatgccctgtcttctttttcaaggggaacttaatcttttctttaaaaaatgattccgataaaagggtatgagaggtgtaatacgcaaatataccttatagacactacattgtttctatttgatgatgtctcttttcccaattaaataggtagagttgaattttaacagctctcttttcaataaacattttttattttgttttgctgcaatgtttgataaatttattgattagttgtttactatttaaagaaaactcaaaaattatgtttctttctatgcaatttatttttatgcctctgatattttccacagattacgatatacctttaatgaaaaactataaattcattccaggctatccccaaaacacatttatgccattgtctgaagcttattttgatgtggatctgtattgtgctcttcattatcccttgatgtatagtcagagatgtcatcttatggtgaatttccttcaaggctttttgaataatagggtctgagttatttaacttcaacctctgtgacccggcaggtcaggaagaacattcctcagtacctctgtatgtgacagaaaattcgtatgtgttagaaaatcactttttttcttatgacactcaatgtaataaagaggaacttgaaagtgctaggaaggaatagaaaagtgttcttcagctacctgacctcctgagcacatacttagttcattccacaactattaaattcagtaacgatataataaaataagactaaatagaatatattatgatagttgcaacaacatagttgggaaaacatccctgtccttcctcggactaaataaacattttaaatagacatgcatcaaacttaaggacggtgatctatttttctgaaatcacacgcattttcattttagtcctgttttatggaagttgtggttttatctccctttgtattttctgcatgtgcttgctctcattttcttactttctctctctctctttctcactcttctcgctcacttgctcactcgctctgtttggctctctttttctatcttgaccttcattaattactaacttcaagtcctatctcttgctcatggaatatagcgtttaaaggcagaactgaatgacatacgcccaaaggtggactctacacgtgaccaagcagcaaacttgatggcaaaccgcggtgaccactgcaggaaattagtagagccccaaatctcagagctcaaccatcgatttgcagccatttcacacagaattaagactggaaaggtaggaagatctactccaaggtggaaacttgtgctaaatggtctcttgcgaaggttgcgcagtactctgaaaggggcaagtagaccccacagcaaggttttcaaaaggaaaatgaatgccaaaatgtatttaaggaaattttaccactgattataatgggagataaacgccactcctccccgtctctgtctctctctgtctctctctgtctctttttctctctcatcttttgctgccatagatattctaggactgcattctatgctgcagtttacatacgtactttcaggggtcacctacagaaaaaaataacaaatagcatgctgaaggccaaaaaaataaataaaaccaaaagcacacaagtcatccatcaacataaagcactaccgataaattttgccaaaagcagtactgatacaatattgcttgtatgtaatgtggatcaaatatccaaaatgaggtcttgtacatcttctgcacggtctagggtgtttttttacctctttactggttgtgcaagtgtgtttgtttaacttgcttttgctagttgtagacactgtgacaaaattcattaggctataatgaaatgatcacgccatgaaaacaaatcattgcaaagcttacatatcctaatttttgtaattttatatgcctatttatattactgtttaagaagaaccagggaatatggaacttttgcgtgatagactttatatttgtgtatgatttgatgaagagaaagtcttatttaataagtagtttgcaaaaatgtataaatatagtgttatagaatttcagctctttgggaagatttgaaatgcaagtaattacctagaaatttatatactgtagtttgataaatttcaatatatatgatatgctttcaaacataaaaatgtatataaaatcaatatatgtatttaggtatatagataattgttagaaataatctgaaatgaaaaaaacattggagtatttatgagaaaatatgatgcagtatgtcaggtaagtattgattcctggaaaaatagaacattttcaaaaaatattttgatagatataagcaaccagtaatagcatggtttcacaattgctgcactttctaaggcattacagtgtctcatcatgttatataatagtacatatttaaagtagttttcaaaataagtgaaatgtgacatgataaattctaaatagtttagcttgtatgcatgagacacagttacccttcaaaattcaccttcccaaattaaaaagttgttagtttaccttaattcattgcaagttatttttaatagttaactacttagttctcttgtactctctctctccatacatagagaccttatatagttgacttttaaaaggctatattctctacatatggagagagacagcatgagagaacttagtagttaactgtcacaaatatatatatttgagtcagtcattattacctgcaaaaaaatgtgacaggctcttaaaattgattaaagttttgaaagaatgtattgttacttacaaagacaattgtttttacttctaaagatatcaatggcttatgtaataacaagacaatgaatggagatttatttcaatccttaaaaaatgctactacttcattactaagatatagacacacacacatgcacattttaataaatcactaagctatagaatatttaagagaaaataaggtattatctttggataaattgtgttacaagattgtggttcacagatattaaaaaatgggtagaatttgctctccaccacagatgtgacagacccagccaatacaagtttgtgaccaagacaagtttgtgagttttcatttcacattctgcatgaatttgtaagtatacttctggaaatcatgcataaagtgatccactctatgaacttcttttattttccctagaaacataaggcataagaaatttccagtgaatattcatttattattattattattattattattattttgtgtgtgtgtgtgtggtggagactctctctgttgcccaggctggagtgctgtggcataacctcagctcactgcaacctctgcctcctggaatcaagtgattctcctgcctcagcctcccaagtagctgggattacgggcgggcgccgtgacacctggctaatttttgtattttggcagagacggggtttcaccacgttggccaggctggtctggaactcctgacctcaagtgatcctcctgcctgggcctctcaaagtgctgggattacaagcgtgaaccactgtgcctggccccagattttcaattatatgttaattaacaaaataatcacatgtttgcttttcaaagtatttgtttttctctaaattagtaaaggcaactgagtgtaacaatgaccccattttagggctctgaagagataattatgctctattatcacgatgaaatgaaaaacacagaaataaagcatatctgacactttgcttatatattcattgcatcagctaatgggattgagcttccattgtgttagagattgtggtgagaagatacaagggtataaagatccttgcttaagaaatacatgttttcaaacagaaatgaatacttagtataatcataaaatatgtttaacactaattcatcttcatggggatgttcaaataatggtgagatgatctcggcagagagaacaatagatttagaaggtaatctcaccagagaaaacagtggatttagaagattgagatttaggcctaactttttcagtagtagccagaatatgtgatttttctgcatatccatttcattgtttgtaagatgaggaagttaaaatagactaacaatttttaaaagaaaacctatcctgcccaaaatattattatttaaaataaagtattaaatttaaatatttaatattaaaatcatattatttaaaattaaattaataaattggaaaataatagagttactagatgggggaaatatctgccattttatctttctccttcctatgattgaattcaggaagtataaattatgctcatagaacatggtttgaaatttctaaattagattagttcataaatccctgctcgttctaaaatttggctattcagtaatcttttgttgattacaataagaaattgaaaacatttaatgtcttgtgtgtgtttgctctggagtagggaagtgctgaagtgctggaggttttagggggtagcctttgatctcaaaatcaggtttctttatagtaggggttatacaggataatattaggttagaatatggcttttctatggttgagtctatgtctaagtttcatggaagagtaacctggggaaaaaaaatactatggtgataaaaaaagtagatttggattgaacacgggtaggtcatagactctttgtaatcagtaatttcagtatagcctttagaacataactctaaagagcccttgaatagagaaataacttatgctgaaaattcactggtgtctagatttactatttggtgaagaatacaaagtggggtactcccatgtctcctgccaggactgttcatgacaagaaattccgaagcccagaaagcagtgagtaaagggatcctcagttcagattggctgaggacttgactgtccaagtgcagctctctgtaatgttaattttggcctcagcaaggagcagtatggtgagagcaaaaagtccttaacttcaagacacaagacctgctttgagcactagctgagcacattactacttagtgattttggatatgcctctttacctctcagagcctcatttctagctacaaaataagggagatgatgcctgttttattttaatctaaagattgtaatgaggatcaaattatgtaatatatgtaaaaacatgcatttaaaatgtattaatcagtgtatagatatgaaatggttaaaaataattaatatcaatgggtatttccatcgttacgtatattacacttgaatggccgaatctggggggttgagacaaaaactgatggaaaaaaatgaaagaattgctgattttctgtggtctctgctgtaatcgactggagtcagaaaatcgtgtctttgctattttcatgacaaagaccagccttaaagataatgaagtggatgaatttaagaactactaaggagttatgtttgtcccacatacgccccttaaaatacataaaaatgctgccttttcccattttattaaggttacctaagagtatccaatgactttgaaaaaagcgtgttttttcgtaatctatgtgaaatcaatgtgaggaaatggcagttttaatggagaggatcagaattgcaacagtcaatcagagataatattagaaccctgagtaaattgacagaatcaatgaggagagactccttgtctcaactgtctctgttttagggcatcggagtatagtggcatggctgagggcaagtggataccatcgggaaaataaggtgataggagacaaaagtataggaaggggcatgggaagacaaaaataaactgattatttattcatattaattatgacagttctacccctctccatccctctagaagccaagttggagaaggggagtcagcaatttgggagagatgctagttgaggtatatctaaaagcactaatgagtgaagacttgagaaaagggattaatcaggatgaattctcaccaaccatatattattttccgataacagtgtttggtagtgagggggatctattgctaggtaaaatacgatggattcaaggagcttactgtttgatgatagggcaagatgtgttcatggatactagattgagagtgagtgcatggtaagtgagtttagcagtcactccagcaacacagaggaggtaacaattcggcataaacatatgagaaagcttaggagcatacagtgtgttcaatgaagagtgagttcctttagttttcagagtagagggcatggaagataaaacttagttgtggatgataaggctgaagattatggctagacacagtgtgaagaggtcatggacagccagactaatcattcatgcttaattcagtatgcaatgaagagttcttgatgtgctctgtgtgtgtgtgtgtgtgtgtgtgtgtgtgtgtgtgtgtatctgtgtatgcactgttgagaaattagtccagtgatagttgtgaggagaattccactgaataatgacatgaagttcgggagctattgcagtagtctagatgagatacactgatgacctcaaaaaaagggatagctatgggagtggaaaggaaatttcagtctagatcagtaaatcttttgtatgcacttgggtgaattgttaaaaccagtgtgctgggccccacactcagagcttctgactcactaggtctggagtggagcacaagagtttgcatttctaacatttttctaggtcagattgatgctgaaggtctagggaccacgcttagagaactgctgctgcggagatatttagaggtagcctagagttaagtcattacatacaaggacccaagaagatgatgaattcaaaaatgactccaaatttaactctgattgactaggaaagtctgcatataaattccaataataggcctggtgcggtggctcacgcctgtaatcccaacactttgggaggccgctgcaggcagatcacctgacgtcaggagttgaagatcaacctggccaacatggcaaatccccttctctactaaaaatacaaaaattagctgggcatggtggtgggcgcctgtaatcccagctacttgggaggctgaggagggaaattgtttgaacccgggaggcggaggttgcagtgagccgagatcgcaccactgcaccccagcctgggcgacagagtgagattccatctcaaaaataaaaattaaaaaaaatttcaataataaaatatgcatcaagttatatttttattgttgtaatacttagctgcaaaataattttgactaaacaaactttaggtgtgtcatattaataaaggcaattattttactttttacaaaatattatgtaatttctacataaaatttgcttagattgtatttttctagagatttagatatacttcactgttctaaggagctgaaatgttaaattatttattctgaaattgatactaaccagaaaaaagtgaaattattttctctgactttgatcctttactaagacttatttgctataggatatatctggcatatgttctttaatttccatataggccttgaaaattgctgctaaaattcatgtagcagtttctatatatatgtattacaactgtaatatgagatttggacaatcgggcatcaaatacttaaatattcattgtttgattgctgcaataattgtaaattaccaagtttttttttttttttttttttttttttacttccattcagtgtcagaagatataaaagtaatcattctttggataagagactttcacaagtttataggaggctgtgagagagtcagtgaccttcccatgtaatgtagaatatataagaaaaagaaacacatgattgggcctaatctatcttaaaatatggttctatgtgtggaaaataattaagcagtgatttaattattttggctctcctaaacttcggtgggaaataaatgatgcattttataaatgtgatctagaaggtccaatgaagatgtattggattgaaaatttttaattaaagcttaattttctgtagtcagatttatcaatgcaaatacattgatattttgcagtctctttctgatcgtattataacttaacacctatgatggaaaataatattgtatcttaattggaacagtattcttgctatatatattctttaaattttaatttttttaatttttgtaggtacattgtaggtatatagatattcatttttagtaaaattttctataaaaacatgaaaactgagatgaagacttgtaaatattgcataatttgtagagcattaaatatgtaatatttacaactaatatcttcaggtaatagtaacagatcactagtcaaactgtataatatctgcaaattttattttactaaaatgaatcagaaaaatatgaacctaacaacataattcttatgttagcttattttttccacatgtgtaattggttatccctataacaaggttaagtccattgaaacttcgctaataaatccctttggtaaccatgtaaaatatttttaaagtagatgtgtaattgagtttggtgagcagtgtcatttgataaaactatctgggtcttgttagcataacatttgaaataattaaagctatttggtgaatcttgattgttctcctttgataaaggaaaattagtcccctgatcagtgtcagtagatgtaaagcaattttgctttggaccagagactttcagatatttataggaggttgtgagagtgtcagtgagttgaccaagttctcacagttagacagtgtggttagcaaatactagatctcagtccattgctttgtccacttcaatacactgactcagcatagtttactgcctctatttatgtcataaagtagtttttgttggtctactatgtgttagtataaacatacccaatttcacttcaaatacagtgatttcgttatactttttgtattaaaaatgacaagaacaaaaggtggtagggaggaagaaatggaagaaggaagggggaatggaagaaataaaactggaaaacaacctaagtaaatgaaaagaaagtttaaaatacaaaattgcttaaagtgttatgtttttacttttgtctgtctcccccatacattttagagttaaatgttttcctcttttaattcatttcctactccaaaaagtcatgtaatcatgaaatagggcaatattctaagttaaactttataaaaggtcgacagtaggaagcagattcttgacccacgaatatattttgcatccagttttaaaatgtgtaagcatgaaattaacctcatccatacaaaatcaattgaaatctactgggtaatatcctctaattagcctcacaaattagtcacattttcacatttttattatcaaagcattaaaggtaaaccagtactttatctattctcaaaagaatgcaaccaatgaaatgtcactatttggagtcaatttatttaatttaaaaataatatttcttacattttcttgtttgctctaataattttaaaataatagaataaataagtttataaaccatattttaaataatctttcttctagcatagatgtagtatctttccaatacacttatttgtttttgtaagttcttttcctctacagatagaatgatgtgaaataactcttcatatcatatcagtagtctgtcttttctgtactatagtgtgttacttgtccttgaaatttttcatcttggtttccatgaattctttatttttctatatcaatattgtaatgataaataaattttcaaagctgcagaatggaaaaaggagactgatggatttgaagcaattttaaaccaatctgtagcacttggattatttattttcaatttaggttttagtgtgatttgaatatagtggtaatttatcatgattattaagattccatagtccagattaacaaatgtttacttgctgtctgtgtaaacacagtcgttattatgctagtgtatctgtgcatgccaaagtaatatttaaccaaggaaagcttacattttaaaactaataaagtgtatctgagtaattttgaatgctttcaatttacaatgaatcagtttgtaattgatcttgcttttcttcagtctgttatcctttgttaacttgttataaaattcagctttaatgccaaaacttcaacaaagccttaaatttcattaatccttaaataatccaacaaagcacaattaatagttgttaagcaatttgaaacattaaaaaatcaaggaaaacaaagtgttgtctttctcggtttctctgtctcttctttatgtgtccatttatccatttattatacttccctgtcttctaatttatatgtattttgtatgactgcacagtcatgctaaagctcttaaaatgaaaaggtaagtaaaaaattaaaagtgtccaaaacctatgcttggtatacactttctcatgcaatattataacttttgtttgattattttctatataactaaaacctattttgtgtgcactgtctaacattgtgtgatttaattgtgattccagttcttttgtggtcatctatttcctttaaagtcaatagaagtaacttacccaataattaagatgatttatcagccattgctttcaactgttttagacaatttatcataattctgaattgaaaagcaggcatgatatactttgtgttttaaaatttggtgactcaagaatgagctgttaaattataaacgctttcttattacatgtttcctttataaagttgcataagaattccaagttacaaagacagggaagaccaaggaatgacatgtagaattttaattgggtgggaaagtgttttctgttttagaatgggcatagcctaatgctgaactagtgaactcttaagaaaagcaatgaatttttttcatctctttgtgtccaaagactattaatcatatggctgtcaaatggctggtgctatcttgccaataacatagctaaaacaattggtttgataaacttattttggttataaaattggtcactggttgattaaattaatatataggtagttctaaaactaccgattgatataataagcaccttttcctgtataaaataaaaggcagtgttttcactggaaaatagagtagtataagacatattgccaactttaaggatggaaaatttatttagagagacaagcatatatctttgaaagccaaataatattatattcctgtctataagaaagcagtgcaacacaagctgagatacacataaatgagaatagaaactcctgaaataacaggtcaatcccactcccgtaatttttcctataccccgaggactgcctgaaaatttcactcagaacacataatgcaagataataagaccgacgtaagaataatctaaattcaccacaagttataaacaaaacattactattttattcaaagtaattatgagatattagttctttacaatgttatgagtataatggttaatagagctctatactgcctaataaggtggtcatgaaccacatgtggccactgagctttagaaatttggctactccatgttaagatttataaataagtgtaaaatatgtgtgggttttgaagagaatataaaatgtaaaatattcatatttttgtattgattatgagtttatacaataatttggacatctcagtgaaatcagtaaaattaattttatctgttttttgttttttactatggcaactagaatatttaaaattacatatatggcatgtattatatttctattgagctgcactactataaaagttctacttgaatttagagacaagaacttactgtaaggttataaaattttaagaaaatgtctgtgtgaaaaggattttgttcctaaaatgtgactgaatacatcctcatctagtctctgcttataaacatttagcattacttgaaaatcagtgtttttaaaaaaattgcagtcctcatcagttgttcttatataaacctaaaatttaggctccaaataatttttgcccactgattttagttaatcactttgaaactacacaaaataaaactactcaaattcttaatcttcctaatttttttaaacaaaatgcacggtagtctttcattggaaaatttagaccctacacattgaactaaagaagtctaagtttccattatcttgcctgaataattagcacttcagtttttggtagtctctcccaaagctctttttacatcttcccccttttttgtgtttacctggtggtatcatgttgcttagcatttgggcagcagttaatatacatactcatataatgctaaccagtcaggtcttttgacatttctacatagaaattgtgttatttaaaattccatgtcactaaaaaagctccttgaaatgtctattttggccctcaatttttagtcttttgttcatttattttttcaggaaatatttacttatgaatatttactatgtaccagaaatgactgtaggttgaacatgagaaactcagctccataggatgtctagggaacacaccccactgactgtatctgtggtatgccttttctgtctccaaataattcctgattaaaaaaaaaaaactgcaccctgtaaactaaatgcaaggctgtgatatcactttttatattgccgcagataaattaatctgtagttttgttcttcaggattatgtaactctaccaaactggaatctaaaatcctccatgttcaccattacaatgttatgatttcatcaaatcccttggtaaaataaagactcattatatcaataagcatgtattttatcctttaaaaccatagatttcaaaggaggaagggcttgacctgagccaatggatgattaggattttgagaggatcaaaataagacccaagatttatagagcatgtatttatattggatggacacatagaagtttgagagaaaataatagtcaacatttattaagcttttattatataccagacaccattctaacatatttgatcttagtaatagccctgtgaggtagatattcatcttatctccatgttataaagaaactgaggttcaatgaggataaataacttgtctaagttccctcagctagtaaatggtagagcccagattcaatctatgcattttcatacagaagtttatgttcttcactagaagatgaaaagtattctaaggtcattgaaggaggcataacagaagatcaccaaatggcctgcaaaaaaaggtctatattaggaacacttacataaggctggcaagtctttggggcaagattaggagaagccttgactactgtgctggaggttggactttattctatttatactcaatagatgcaggaggttcttcagcaaataaatagcataatgaaagaaaggtttttgaaacatagtaagctgatcattgggcacaggctggaactggtttgactgaaaggagattttacatcttttcaaagcttattgccttagttttgtgtaaggaccaggaacgatggagtctctgggaatacaaagcaagtggatcatagcaagtcaattgacacttacttgatatttattagacattagagtgagatgttcaaaaatagcatgacttacgttttacgcctgaatgactgagagaaatggtcttccattaagagaactagggaagttagtattgtaagcagtttgcgggaaagataatgtgctccatactaggaatgtgaaacttcaggtgaaaattcagctggctattggagagtctagatgggaattcaaaagtcagataacagcttagggtgaagacttggaaggcataaaaaattgttaaattcgtagaaaattgtatcttaaattaatagaagttaaattcatggagagatgagctagagaagaagcagttggaataaaacaggtaaatctgactgtaaatagacctatgttcttctgacatccaagtacacaataaaagttattttcaacattatcattatgtattcacaaaatcacatagaacatagttgctttcattaaatattagcaaatgtgaacaaccatttaataacataaaatatcaccaaattgataattgtatagttatgattctaagggttgttaatctttttacttttaccgtcatctaaacagtgtatgattttattgtaccgtaattgctaataatacagacattgaaactttaagcatgtttgtaccactaccaatctatactggttcaaataacttatgatatttcaaatggcaaatgatcattaggatttaaaaactggtactgtaataggtcacttaaaattatctcataaatctttcaggggtgtgtagaagtacctagaagatatgtggttattcatgttgcatatgagaatcatgtcatcatgaatagaatttgattattcacttcttcaatagtgacagattattacctttagatatttagtttttcttctacacttatccgtattgttcaccagaagttgccatctaataaaaattcaacctcttcctgggaatgtgactggagaagggtaggtggggaccaaacttgatgaatgtaatcgtcttggcaaaagacacgggggtcattcctgaattggttttacaaaagtaaaatgttttagctctgaaagaaaatcagatttctgtatgtcatctatgggttttcaagagctatcccatataaaatatgttctagtgttttaatggaaagaaatacagcataaagattgagagagtatcaatgtattttattaacagaattttaatctaataactaaaccttgcccacttttttgaatatatatttgattttccatgtcttttcacttatcactccttttcaagggttttgtttagaaagtcaagagattttaaagttttcttagactggtcattatcagttcaaaagtaaagaaactgatgtttacaaggttgaaaagcatagattctttatgtgaaatatattaggttcattcgtttgaatttatttgcatcaccaaccaaactgttcctaaggcaagctaatggcattgtcttagaagagcatgcctgtcaattgtgctgtgctaaaaatgtcatttaaaacatctgagcagattgccatgtagtttttctaaggataagatgacaattctgcatttctacctgaggttactgttacttgataaatgaggcaatttctgatgagacatatttacccaaatgtatttatatcagaatatttaaaataaggtcaaatttgactttagaatattaaaaattagcccattcaaatgtatctgtaaattgactgttgttgatatcaccaaatgatgaattgtactatcttgcatgtatgttcagctctggtgatgtgaaatgtttctccttatttgcatcctcaggtacttttccagttgtatttcaaaacccttcataaaacataatatggaaacataatgcatgtgattagtttagcaacaggaggttgaataaatgtatttcttttggtttatgtttctaataaaaagtaattttgatttaaagtagcactatctttttttttaggcctccattcctttgaaggaattggagcagtttaactcagatatacaaaaattgcttgaaccactggaggctgaaattcagcagggggtgaatctgaaagaggaagacttcaataaagatatggtaaattggttgtgataaaagtgtgaatgaactaggagtggaaataaatatttggaaagaacttagataagtctccaactgaattttcagagcacatattacacattttatgattctaatgaattttataaatgcagaatattcttggccttttattacaaatgctgaattactatggtatggtaatataggagcacttacggtttctaataaatagcccagcaattttcttttgacctgacctacttttgaacttatcaagggcaaaatgtaattggaaaaaagagtcgaatcataaaataaactaaaaatttaataaaatactcaactatcatagatgactgacattttgtatcagcaatgtttttggtagtataacatttatttcaatgaagagagaataatgcataatatgaacattatttattacaatttcccacaaagttgttttaccaaatagttgtttagttagtacattatatgtctaaaatgtgtataaattcatgctgcttatttcatgggagtaaagaaatatgaccatgtgtgctcttcccaacctcagaatattctccttcaatcccaactaatttcaaagtatctactacatttctctctggcttgaatatttgtacatcacatccttattaactgactttttttttctctcttcatcctccttttcacaattttttcccctctttcactgccatcacctctgtggcattcttaacctttacaattaccagtgctagagccttctcagacaatgcttgaaagtgacatcagaagacaatatataaattttaggtaataagtgtgtgaagcaataggagaactattcccaccaatcttagttcccacttcctggagctgcctcaatcaatactccccatgtatggggtttggtggccttgccaactcagcttgtggaaagacggaagaggctttccaagttgctgagttacagcaatctctacttcaggtcaaagaagaaactagagggcaccaagatgaaaaaaagtactgattacctcttgggctgaccccaactctgccctagagccctcaactggtatagggaaagaagtgaagtgggttttttaattttttgttgtttttgtcctcagccctagaaaatgctacagacttttacaacaccttttaaaataagtaaagtcttttacagactataagtatatgatgtgtctatattatgataagtatataatgtgtctatattatgccgtatgtttctttagattattgaccagtctctgacaaaaataatccctttcccccatacaaaatgaatcagtcctcagttgcgtgttgaagtttatgcattatagatttaaatatataacatctaattccttgaattgtaatacacacatacaaatacttgtgacttttgaaatttattatttgttttccttatgtcatcagtgtaccttgagtaccattacaatgtgagactacttgatacaaagttttcacattctgagttgaaagaaagaaaactaaaggtgaaaaatcacatggtcatatatgcgactatattagaccagcatttattcaaaacattttatttctaagtaaagaaaattaagatattgttcttgcagcctaaaggaacaaaatacccattgaaaatgtttaaagccattttccagtccatattttagtattatttgatcgtatttaaattaacatgcatatatgacatattttagaaattatttgatggtaacttagcacatgatttttattaatatcctgatatttctcctattaatattgagcatttaggtttcagaaatgaagcaggagttattagataggaattagtgtacatttaaatcaaaatattttcatgtagttgtgtgttaatattttcagatttgctgttatctcagtcacaaatacacatctgtattcctttatggatcagttaacattataaatgataactttagctcatttctctaatgttttaatttctagaactacactaaaaaagccaaaagaatactttcacagtaattcatgacttgtctgacatgatgaagtaccacactcccccatctttctacaggtgcccctaaaaatgtgttctttacaactagatgggaggaaacttattttgaaacctcaagtaccaaatgtaaaagaaaggctatgagcacagtatcttataatagcattccatgaaagttttaaattggatttttgtgtgtgtttaaataacatgtcttattatctctgttaacaatgtacagctttttaaaaaccaaaatgaagactgtacttgttgtttttgatcagaatgaagacaatgagggtactgtaaaagaattgttgcaaagaggagacaacttacaacaaagaatcacagatgagagaaagcgagaggaaataaagataaaacagcagctgttacagacaaaacataatgctctcaaggtattagagctaaaattataatataccttgcctgtggtttttttttaatatatagggtaaaatataatgtgcattaataaaatctgcttcagacttagtcatcagaaactcactttttctgttcaatgtgtatgctttatttaacatttttgagtggtatttgattttgaacgatgtgttgcttaaaagttatggctttttaaagacatatttttctaagtagtaattgaaagatgggaatgcattcatagtacttatacatttaattttctaatgtgctttatttttatcagctactttatattgaaaaaaacctgcctaactgccagaataaccgatctacatgtatccattattcctgctttctttacttaattgattttgcttgcattaggtccaattttttggtaacctgatacttgtttaataagccctagattcttttatttatttttaaaactttattatgcctttaagaaagtcactctttgcaactatctacaaagtcaaatttcatttatgtaggaatcctaaaaaataatcttagtgcccttgaataagaactgctactttcatattaagcagtgtagtgtatggcttcaagtccccaggtgactcatctggtttgtgcaggaagagcaggataaacttaatttttctataataatatctaggaagttcttgagactagacatgtggaaagttttgtgaaactttttttttgtatatgctttgcaataatcactatttgcatgcatggctgattttctaatacttttaattgctgagcttttccttgtaaatcactcttttgagctatgtagttatgaaggtggatccacctagcaggtagatggagtctgctttctacatgcaaataagagaataaaacctttccccctatagtcaaccaaataaacactgctgagaatgtaattacacaatattgtgcctgcaaggaatccacaaggaaagtctaattggccagcaggtgttctgaaggtaactgctgataaatatagtaaacagaaaaggcctcttcctcgagggagtgcaaaagcacaccataatgtgtctagaaaatcggaacgctatgtaactcacacccttccaactgtgagcaagctttcagaagtatctacactggtcgtatgatggtgtgtgtcctactgaatagcagtgtttaatggtcatctggcattcctctaaagaaatctacatgacatctctaaatattttacatattatacatcactttgtgcttaggaaatgaaagatgtttcagattgatgaccaccaagccctttctcctggcaaagatgtgagttatgtcacaaataaggcatggctcaactctaattcacgtggctgtatcttgctacctttgaaaaaagcagcgttcgatctgactcctcagaaggtttgaaaattcaacataaaacataaagtacagcaaggtttaaattcccaattttaaacaaactagataatgaaatgtagttcattcttgcaaatacaggctataagtgattaatcaaaatcgtcaacactactcgccaaaccaatctataccaacatattcaataactttttaaacctgtcaaatagttccaattctggtccttatgaaatattttagagaaggtcaaaattttccaatggaatgaaatttttagaaattccctgatatttattattttttcgctcgaattaaacctgtgaataaaaccctaattgctactttctgtagaaatgaaagctgcatgcagagcttatgttcccatgaattataaaatggcattttgagtaattctattaatcacagaagatattgagtgtgcttgtaaagagcatgatgactgatttcctcccattgttgatttattaaattagtcttatcacattgatttgaaagcatgcacttgctgttttcttttttcaaatagttaattgttttgcatttagagcatgatttggtatagtaagataaatgtggctatgcaagccttggaaggagaagcatttatctcacataattttttattagttatgttcaccaatatacgaacagtggtgacacttctacacatacagcttggaacagtttataagacaactaaaatggctttatatttctaatcataaaatattaatggcctatgaaactcttatgtaggcatttctaaaaacatgaatgtatattggttgagtacataaagttttgttgatgagccccaaggctaaagatatacattttagaattttacctattttaagtcagatacaaactcactaggtttgtgagtttgtatctagttaagtcaattgtattcgtatattaaactcttgcacataaactacacaacagttagctcattaagagtcaattgaatgtgacaaaatttttaagcaagtttgaacatgctaagagaaaatactttaagtgtgttattcaggtttcttagcttcctatacatgggtcccgcctcatgcataggcaatttaattatgtctttgtatattttgcatttaaatatgattttaacctaagttgtacaaaaagatgagggacgcaaattattttgataaataactgcagccagaagtgcactatacatatatattgatattttaataatgtctgcaccatgaacaggatttgaggtctcaaagaagaaaaaaggctctagaaatttctcatcagtggtatcagtacaagaggcaggctgatgatctcctgaaatgcttggatgacattgaaaaaaaattagccagcctacctgagcccagagatgaaaggaaaataaaggtaatgttgttttagaatgtcaataccagattttattatacagtttaattaacctgtgaagatcatatttaaaatgttgatgttcttgtttctattaacgttctctttgatttgatgcatttccttgtattgtgtgttgttttcagtaaatgtattgtattaagtgttattcaattgacgtaatgttgaatgaataaaatgttttagactatgtaaagtgatttaagaaatgtgatgtgttttctggtaaaattgtaattgactttgtgtatctttgttccagatgaactaatgacttatcggtatatggacgacttcttactcatgttagcccattcatttcatcagagcatcttcacacatcagtgttcactctctatagatttatttgcatattgtctaaatatgtttttttctgttattattttacactttttattttgcttcattctctgttgagttcctcaaacctttaaaaaggaaataaataacttattcacttaccctctaaattatattctatgtggacggtccctaataaataatgagttatcactccaaattgtttcaaatcccaagacaccagaggaatttagaagaaagaaaatgttagaccaatttcaatatttacttaattagaatatctaaaaccaagcattcaaaggataactgaaataatatttgggttattgagcgaggatgacagtcatgcctttcatatttgtaaacttcaaaggatgacaataaagggacaacagcctttgaaattttgagagaagtatttgctgcttgcaagtcggttgatgtggttagctaactgccctgggccctgtattggttttgctcaataggaaattgatcgggaattgcagaagaagaaagaggagctgaatgcagtgcgtaggcaagctgagggcttgtctgaggatggggccgcaatggcagtggagccaactcagatccagctcagcaagcgctggcgggaaattgagagcaaatttgctcagtttcgaagactcaactttgcacaaattgtgagttgttactggcaaacccacgtatgtgtttgcaactactactctattaacagaggcctactaataaaaaaaaaagagacaaaaaatctgggtacagttttaaacttctaatgtacattctgaaagtgagtggtttccctcactttgggcttctgtaacactagtgcttaattttgccaattaaagacacaagaaattaacagataacagggaaaaccccttatcaaaaatgaaaatacatcttaattttttttgctacatcatttttcataacattggcaatgttaatttgtcaatttatcatacattcactttacttcaatgtctaatccaaaaaatatgtattgctttcctgagatcatcccatgctgattttactttcttaatgtatacatgataaataataaatatttcatggtacatcttatgtcaacctgcataagccattatctcattgacttgaagaataatagcttaatcctcacacctggtttaactacttaatgggttacagtgcccataaaagaactggatgcctagtaagatggttgctaattgattgcagattgaacaatatcagataatgttattactgaaatgttaccagccaaaacaaaaaggagtgactgctcttctttcaaacaactgaatggaaagtgtatggttctctctttaaaaaggcgattcagaattgttagcttggtctcacttctttatttgtagtaggtataaaccatagaggttttctgacaggtacatttttgttcctattattaacacttgtaagatgaagaggaatgatcatcatctgtaattatagaagaaagtactcctcacaaaaccaggatgtcaaaatctggaaactaagtctttatagttaagttaggttgaattatatgaatcaaacagatactcaaccattttgccctatgtaaataataactgcatagggttcagcccatgtatgagacttcttgggaacttcttctgtgatagtgtcagttccatttaatttggtgtatatttttaaaatgtcaaaagcagttaccataacttaattttataagcatataagggaagtatgttgcatattattgtgacttcttttaatacttcaagaaaattaataaatacactgttttctgttaaatctaataccctaaagtttaatagcaggtgaattattctgagcaattggaagaatacgagaaatagcgaaactgtattgcatgtgaagtctaattccacctggctgaatgtttcagcctattatccttcatattagatgttatgaatgtaatgtgtcataaataaccttacactaaccagcaagcctgtgtctgcagatgcaaaatgaagcgaaagattaaggcaatcaaaaagaaaattctaataaaatagtttcacctcaatttaatagatcattcaagggggagtcctttgctttgaattatctgactactaactcatttctccattccaattttccccaggtcttgacacacccaatatgcaggtttaaaattcgttacaaactaatcaagttgctaatgctttatggctaaataggcacaggatcaaaaatctccataaaccacttacttaaaatgccattatgtccctattcatagtaggctctcaacaaatatttgtacaacgtaataatgactggtgaaataaaggaagcatgtgtgaaccagtatatatttttaaaaaattgtagtaaaattctgggatatattttcctcataaacgatttattcttaagttttatatattaaagatccaaaattcagaatgtgaagggggctatttttgtgttaactcttaattatccatgataataaagtaatcacaatctgtatgaagaataatcaatttaatattgcagttatatttggcatcgtattttaattagaactgagggataattgatagatgataagtaggtatataggttggtaggtagatagatagacaggtgggtgtagaaatattcaagatacatctttatacttgaccaattgtcaatgcattttaaaactaatttcactgtggccactgattagagttatctttcccaattcttacgccctagagtcatttgtgatagtcacagtaacagcttaatgaaaagtagtatttgatataaccttacaatggctctgatgcagcatatgccatagcttcagaatttcttacctccccctatattctccttctctaattgtttgatttttacttttcctaactgtccctttttgtttttctagatataaactgtaggcttaaagttcatctttcatgtctttacagcaacatgttgaaatagtaagcggtactcttaaaatgcttagtatgtgagagctgagtgagtttaaaatgaaaaattaattttccttatctcacagataaagactcagagaagtgctaaccactgtaaaattaaggcatttaggggactctgtccatgtcagagctatatatggtagtaataaagctcagaaaaggactgagactttgagggaacaatcatgaggcagcgcccagccacacaggaatgcagaccaaagcatagtagagggtatctgcaaattgtggtcctcagggcaaacctggagatgataaagaaagaggcatgagactgggaggacgcaggtaaaaattttaccagatattcaaaatgagagaactcctgccttaattaggaattccaatcatttctaatatatttcctgttggtttagaaactaggttcctcagttaagaccaagcacggactgtaaactgaggaaaagggatagttctataggatgtactatcacagcagtgtggtctagtaaaattaactcttggataaacagccttgaatatgaatcccagtgactttgagtgctgtatgatcagggataaactgagtctcatttacttcatctgtacaatagagataaggatgtttctgaggattaaataaggtaatatttgtcaaacacctgctgcgttatgcaggctcaatgcatgaaagttttcttcgtctcctttctgtatatatattaacattggaaaatagacataatctttaatttttaaaatattttcataagtcattaagagaattaagtacgcagcatttgtttaaaatgttaacaacagatatctcgttcagtgaaaatttcaaatttaattctataatatataagcagatacttttctctagattcacagaataaacacaggaaatatcacacaaatctgatgactgccaagaaagggcatgattttccctaaactgcccctcacatcattgtagcatttggaaaataacctcagagagcccaggcatttgcaaacacaaaattatacaatgaagataccactacaacccccaagggtcatgtgaaactgctaaggaacataagcttacaaactaaaattatgattattgtggaaaaaaattataagcaatgttatcagatgccaaacgttaaaaggagaatgtatacctgaagaaaatagagataagaggataatcaccaaaggatattaagtaatttttaatgttcaaaaataaaaattaaatggatttttttccagtaagaataggccattatataaagtgaaaacgaagatttgaaaaaacaaagtctggaaatgaaaatataattaatccctcaaacatctgcgtgaaataagtttcaagttgaaaaaaatagggattatggggaagagacaatatttcatattaatgaaatttaataaaatggaataaatgtaaattttaatgaatcctcaaattcaataaaggtcaaccaacgtggaaaaaataaaaacaagtctaccagctagctctgaatgaaactcagagcatcagtaatcaaaaaggtatcattaagggttacttaagacaaaagaacatttacaggatgacaatattgactgaagacttttcatcaacaatagatattagaagacagttgaataatatcttcaaaatgctaggcacattttcaaataccaggtaaaacatgattcaagaattaaggcaaaatattctcagacatacagctagtttcacctgaacaaaaactaagaatttcttgtctatagatttttgctaaaataattactaagcaatatatttgtgtaaaataaaatgaaactagaaggaaggagacagcgatgtaaagctgtataaaattgttttctctgtaaataagaacatttattaaaaaagcttataatcctaaaatttggtcagtgccaccaaggaaaacacagaatactaggagaatgcagtgtttgactgatcctgtgtaaagagagagaaatcaaatagaagacttattgcatatcctatgaattacatatccttaattcatatcctgcatattacatatgctatgtaaagggagataaaaacaagacttattcgagataatggcaacaaatataaggcttgtgcataatgtgttctatgtaaattattaccaattataatgtttctagatagcaaaaaagtgctaaacctctgaaatatgtatacatacatgacctttccaagaacagcagcaaaaaaatacaaaaaaaagcccacttcagtgaagaaaaagaaatgtccattttctaaatacatttccacttgagctgagcatgttatgacatcaaataccaagtatatgatcttgatgtttaacattttatatccaacagtctcttatcttggatgcctaatgagcatctcaaacatacaatagccaagtgaaaaataaatgatccaccccccatctacgttaattggcatctaccaacatctccagatgttattaaattgcactattatttacttaagtcagaaacctagacatccttcatgattcttttctcttacattaccatgtaaattatttccactcttgttggatatacctgcaaaatgcatcaaatcactcctccgtatctgttatggaagtgctaatctacaagattattatctctcatctggattacttcaacaacctctaacctcttcttccagtctttccccacttacaccatatttctcctggtgaaggcagagagctccttctaaggagttaatgagatcatatcaggcccctcctgcccattactctttaaatgaaatcctgtgatccgctatatgatgtagccccttcctatcacttctgttactcacactttgtctccctttttgctcttctgctaacatagaggcctaaaggtttcttttctatacttaaacacaaccaatttcatttccatatcagtatctttgaacatatttttctaatggaatatttttcacctagaattttgcataggtgctataacttatttagatatcctttcatttaggaacaatgaatatttagtagaactttgatgtataatctggttatgtaatgtagtagtttctgttataaatgttttatattccctatacttatgtatgcaaattcggagtttaagactgctcgttcagaacatcagtttctcttacggttacttctagaagtaggcatactaaggaaagacacagcttctggaacataaaagtgaggtggtaaaagatgaatatgaagagggttacaatattgtattgcaatggatagcttgtcctacagcagagtaattgtaatgggatattttgacaaaattaaagtacacatttccaaaatatacatgctcttggaaggctgatagaaaattaaccttgtttgtagattaaatgctgcaataaatgtgttatttaaaatagtccttggctgggcgtggtggctcacaactgtaatcccagctctttgtgaggccgaggtgggcggatcacttgaggaggagttccagatcagcctggctaacatatataacatgtcatgtatatatatgacatgctatacatatatacacatgttatacacacacagataacatgttatacacgtatgcacatgttacatataacatatataacatgtacgtatacacacgttatatataacatgttatacacacgttatatataacgttatatatacacgttatatataacgttatatatacacgttatatataacgttatatatacacgttatatataacatgttatacacatatacacgttatatataacatacacgtatacacgttatatataacatacatatatacacgttatatgtataacatgttatatataacatgttatacacatataacgttgaatataacatgttatatatgcacgttatatataacatgttatacatatatacacgtgttatatataacatgttatacatatataacgttttatatatacatgttatgcctatatacacatgttctacgtatatacatgttatatatacatgttatgtatataacatgttatatgttatatatacatattatgtatatgttatgtatataacatgttatgtatatgttatgtatataacatgtttgttttataatgttttatatataacatacacatgttatgtatataacatgttatataacatatacacgttatatataacatgttttatatataacatacacatgttatatatataacatgtatatataaatgttataaatacatgttatatatacatgtatatacatatatacatccatatataacatatatatacaagttatatatatatgttatatatatgtattatatatgttttatatataaaattagccaggcttgctggcagttgcttgtaatccaagcttctcagaggctgaggcatgagaattgcttgaaactgggagacagaggttacagtcagcagggatcacaccactgcactacagcctgggcaacagattgagaccccgcctcaagaaaaaaaagtagtccttaattgaataaatttgtaaaataaacacctatatattgtgaatatttttccactaacttttttaagttgtttgaatctgaatagtattatacattcacaaagagttttcacatgcatctagtttgatcacagtaatgaccctctcaagtatcattttctttgtcattttactgtaagaaaaattagcataaatgaggttaagagatttgtccaaggatacatctgagaaatggaagacgccaaacttgaactcactgctttccaaaacatggtgggagttattaataaaaaaggaaaaaagtttcagtgtttaaacaattttggtaaacagtagattaagcaaactttccttactctataactttctagtgcgtttgatatgctaatgggattatgactttctatgaaggggttagattctatagactttcacatctagacagttgcagtagaaaagggaaatttgatttcagattgatgaaaggtttcttatttgagtgatggtgaaataagaatattctttagaaaaaaatgggaagaacatcaccgtatcattattcttctgttgtttgggatttccttaaatttaagcagagatgtacaagaaaagtaataacagaactgtttgccaccaccttatgtaaaataatgtctgagcctagatttaatggtctgctacacattttttatattgtctcctatcttgtaataaaagcaactcattttgagaataaaattaggggaaatatattgtctttgcataattgccacatagattttcttctttgccttgaaataacaacaaagattgtcagctgccagtgcaacatccttggagaatttgggaagataaatgattttcttatttagagacagaatgttctttagcaaatggaattgtaaatacaaaagactaataatggttgttaagggaaatgttgcaccaggatgtagctgtttgtagaatttttctcctctcagctcaattttgtaattaacatattacaaggattaaaaaagaaattagctaacattttatgtttttctagattgttgatgatcatagtggttataaatatttgtacggagtttttttgttctagtgtctagttgtgtagcataatcagtttaatggttaagtagaggcatgttcagcgagtatcagcttccagaaagatgacagactgacttaattcctcaccccctcacttcaaatgcgtggaaattctgaataaaatataatttttaaaagttttaaatacacagctgggctatggtggaacctctcttccctctgtgtgccatgaatgatcaaatcatcttacgtgaaactgaacctggattgagagcctaatggctaggaagaagttttcaagaccttttaggacaaaatatgtgaccttcaacaacacataatatagaggtgaaaataaaacccctccttaaagtctgaattttcaagggcttccctcagctgtaaaggggaataaataaatcctacccacaatggagaagaggcattatctgtagtgataatagcttaggattttcaaaacttaatagaaattccaatactccgattgggaaactgagcaaatctgaagcagaaaagattattaaaaaaaagaaatataagtatagatcatcactatgagacgatgaatctgatgaatccaaaaaaagcaaagaaataattttaaatactgctgtatttccttagaaagtagtgacacttaaaatggtacctggttttagagcaatgatagaagccagaagacggtagaataatattttcaaaaacaatgaaagaacatccacgtaggaacctagaattgtgtactgatagaaactctctttcaggaataacattgaaataaagatcttttcagacacacagaaaccgtttactagcataaaattccctttagaggacgtcaagattggtctttaagcaggagaaagatacaagatggaagatttaagctgcaaaagaaaatgatgtgcaaagaaaatggtaaaaaaatggaaaagtcttaaataaacatttaccgtgtatgaaagtgtctattaaaaaacagaaaaatgctggacatcaatgaaacatgagaaggtggttaagtttttcatccagtttacctgctacctttctatgtattgtttctcagtttccataggtagtacctacttctctaatgctgaaatgcctcagtgctcagtccttgggcacttgccatttttatttattctatatatgtcttgctgttttcatccagcctcgtgacttgattaaaacaaaattattcttttcccctcaaatgcagtggaagcaccgttctttcaaattttcagagaaaaaaaaaaatctacgcatgctttctttagcctatctctacacaatacacagggacaacatttgaaaaatataaaccatatttaaatctgatcataatccttcaatgaattcccatctatttttaagtgaaatccaaaactcttcatgaatttcaagggatatctgacctggctggcccacttcttaactcaggccttatctcttaatactttcctctgctccacctatgttgacccctttgctgctgctttcacagatctgacatgcacccattgcattgtgtgctacctctgcctaaaataatcctcccccgtttctccatgtggctcttttcgtttctgccttaacttctttactcaaaagtgtttttttcaatgaatctttctcatgtgtgcacatacaccacacacacacacacacacacacacacacactttttatccatgctttcctcatttatttttctcaataaagtgcatgaccaggaaagttctcaatattttccttctttatcttcttgagtatttatttccctacctagaagtagagctccaacccaacaatgcaaaaaaaaattgtctttttttcccactgctgtgtcctcaacacccaaaacagtgactaggtacacagtatatatttgtttaattcataaaataagtaattaatcaataatgaataaagcaattttaagattctcttagtgcttagaatgaaaacttgcaaaatttcttgtgcgtgttaagaattttatactaatcattaaatcgatagaagtatacaatttttgaatagtagagggaaaaataaagacaagctattaagttaaagcaaataatccaaatagaaaactgaggtttaagaacattaattgaattcatcaagggtagtaagaaactatatgaacataggattttgtgttttccgaatatctctagtccaaagccatcactatgtataaaataagatgttaattacagtttaatattcttgtaagtttaagcaaatttaccatttatacgtgatttatacaacatattacctcttgaatattgtctcaaatgactggcttcaagtagcacgttaaataaaaatagtagaataaatgtgtcaagctacacttactattcacaattattttatagttagattatggctctgttagatatacaattttatatttgcttatcttctgaattaatgttacagtaatagactacagtcatcatgcaatgtgttgtcaaatatattaataaacataagaaaaaacatagtaatatactgtgtcaaatttttctatcaagtggaaatttagcacattcttcaggaaatattgactgcaaaatctatgattaatatatttttcagaaatattggatataaatacaaaatgaagtgatgaattattgatatgtgcagttttactatcatataatgttactgataaaattaaaaaaatataactcatttttagcatcagatgaggaaacttggttcactaaagttagtattatctttatttgaatgctacaaccttgaaaaattattacatttgatagaactatttgggaacagtttgttacttctcattgtgactatggacattaatgggatgcccatattccttccattcccttttcttagcatagtggaaatgattacagatatcagttatgtttcttgactgatgttacagtcattccgcattatgaagtatgcaagactaaatttttacaaagggtatctcttatccttatgatagcctaaaaaggtgaaaatttgtcaagcaggtttcctaagatcctataaaattaggggacagggttccagcatcaagatgtagttttacttattgaattaacacagagttttgttgatgattttctttgatgatgggggtagtgatcgtggtattgttttattacattggtttcttcctttttttgttcatttttaatgggaacctcccaataatggtgaggatgcagttaaatggtaactccatacacttagtgtgagtctagaaataaattcaagttttattttgaatacactgaattggtatttctttcattgaataaacatttatctagtgcctcctaagtgccagacaacacaaaacgtaaaataccattggcaaatccatagcaatcatacaaaagacgtgatatttgataaatataactcatacaatgaagaaaaaaaagaacaagaatttatacacagcaatttgacctccgtttgcaacacaacaatataaagtgtaattttctccaatctaaatttgctttgaaaatatggaacaccagctggaagggagctcagatggcttctgcagtggggttggaaatatccttctgagcatgtccagaacaactggttaaaaataattaaatcacttgcaccatctgtgaatcattctgattcttcaatgattacttaagactctcattgtatggaacatattctgagaacagatgaataaaatctattcaagtgtatattgttttccactttgattttcacaaaataaaaggattataatattttcaagttggtaagttatctgataattctcctgccctcctttatgatccagttgcttttgaaataattaaggtttgtttaaaatttagttttatgaataatacaaattcacatagccttgatgttataacataattttgcttaaaaacattctatcatttttaccctttatttaatcttttgagtatagtttagcacccatttagtaacagccaagagaactaaatggaagtccgaattgattgcattctcaaatttagcaccatatgctataatcatgagcagtttttaaaattcctaaatagctattttaacgcatgtaaaacagaggaaagctatatttagtggtgactaatccatggatgaaagatgcatggattaaatataatccaagtgcccatatctgtacaaacttaagatgttcagataatttggaggcattgttaactgtttttctggatatcagtgcatgggcacttctcgccagaataaattaactggggaaagttccagaaggtccataattttccataataattagtgctttcttagttaatagactatctgggtgatgaaaaataaatgaattacctaacaaatacagttatctataacatataactccatctgtgacccgtataaagctcaaaatgtgttaactggttagtatctagacaatcataaacacacatgaaacatgaataatatcggtcactatattttcatttcttgcttcgtagatacactcgagtatttcatatgtggaaaattaagagatctagtcctcttcatatattggcctccctaatgggaaagggtctctttaatctgctacaaagccctcctcttctttaaacttgccaagatgtcttctacctcaggtcattgcaattatgtttcctttgacttgggcctctatttctggatatttccttgctggtctcccgtcacattgcaggatgcagagtgaacattatctccacaggtggcctgccttcgacaacctattttatgtcgttcgccacatccattctatccttaccatcatgctctagaacatcagctagacgtttcccttctaatatttactgcaatctgcaaatgttacctttgcatgtttacttgtttataatttgtctgctatcattagaatgtaggcttgatgaagtcaggagcctattctatcttgttagtcactgtttccccaagacatagagtctatcacagagcaggtatttaatgaaagtatgtggaatgaatgattgaatgaatgaatgtataacatcttcctgtggaaatccctgcagtttcagagttggttgttctgtatttttatgtcagtggtatcctaatgccagtctgccatggtccagaagttttcaatggtccataaggaaaagaaaaaaaagagcaattttttatttagcttttcataaagcaaagttttttaatgcaagaattgtcctttctttcaaaattatgggtttcaacagttttggaggtattaaaatggcctttctttttctttcttctcattttgttacaatgtcctttactagaaaaagtaaagggcagaacttttgtgatgttccctaatagttttttttttttgtaatgttgttattgacctatgaaatacaatgtccgtaaaccaccaacttagataaatttatttacatgaaggaataccattcctgctaagtttctatattggttgcttgaagtttcagaatgaggaagagaaagcatgaaaaccatcacctcctatatgtatggcctgttcggcaagcagtactggccccataacagttatccactggaataacattcttgaatttattttgtcacatgtgaggagcaaaaacaagacaaaatacacaaaaaagagtagaattagggtatcacgacatttgtctaacattgttcaacgttaacacttacaaataataaaggtaccaaaatggtattttcttgtgtataaatattttcatcctctggatttgaatctgtttttgtttgttttggtgatataaagaactcataatagtatcatttcctgatgatatttggaatccaaaaattaattcaaaacagaagtattacattttctgtccttttcataattgtaaacaatgcatcaagatcaaaaacttaacaaaatgcgttaatgttattatgcatgcttttttcacattctttatttcccagtgatcataatgactaataattaacataattatttgtgattgacaaaagactctaacgttcatcattttagttaattattatttaagaaataattggtctggatataatataagccaattaaatttgtattctgaaaagttttgagaagtgaaaaaaaatttattttttatttggtaaaatactttatttctgttgtagctgcttttacaaggagattgtggggaggaacagtcatatccaagttctcagttaattaccttttcaaaatatatgatctaaaatggagtgaaaattgattgtgtcaatatgagtttttagagttaaaacttgtaaattttctggacagaatagaacaattttatattggaatccttgccataggataatacaatgactattatttcctggaacattgacagagaacaagctattttaggagaaactatctggattgtaaagtagagcacattaagcctaaggtgtcattaaattcacaaaacttttaaaaaagaattgagcgtaatctttggtaagagaaaaatggttttcttcagtgactattaccatattttgcaaagttataacctggcaaaatatattattttgggaaaataatattaaatataaccatttctatacacacagtggcactttatttattcagaggtcagatggatatcattttaatttacctgcaacacagccaagagtcaggaatggagtagaacaaaaggcctctcgattcccaaaattgattttttaaggttcatgaaatccaaagcttacttatatttcattatgaaatgaatttccaaatccttttttggagattttttaaaaattttgctttgattaaagaggtaattctaataaacttaattatctctttttttttttgtgcccctagtagctttgaagtcaaaatgggacagaaggaataaatgactgaaacaggagataatagctgcagcctcgagtaaggtgaaaaagaacctatatatatggactcatagtttggggaaataatttagcacagggcaacacagatgagagagggagggatggaggaagggagacagagagagagaacagataattagtgtttatttcattttatacttatggataatttaattatttcaatagtttattcatatagttaggtaaatactttttttttttttttgagacagattctcaccctgtcacccaggctggagtgcagtggcatgatctcggctcactgcaccctctgtctcccaggttcaagtgattctcctgcctcaacctccagagttgctgggattacaggcaaccgccatcacgcctggctaatttttttatttttttagtacagacagggtttcaccatgttgtccaggcttgtcttgaactcctgacctcaaatgatctgcctgcctcggcctcccaaagtgctgggattactggtgtgagccatggcgcccagcccaaggatctttaatatcttacctatgtgcaaaagtgtttaatacataatgccatatggcatattagcttcctaaatcacataccactgccaccagctaacttatatctctatatttacatctgaggctgcataggcacacataaatgtattcatatatgttacacatatgcttatttatgtagctatgctatatgttatttgctatttacatctattaagttacttagcaaaatatgtcctttggctttgaaaaaaatgcctgctgaactcatcaagattatgatttttgtaggttattctccatcttttagtcgagttcctaaagttgtgtttttttaactgcctgctttttattgcaggtatatgaaattgttgtgcatatttcaaagaagaatagaatgcagggtaactctcaaacttgttatttggaattaggtcagataattttgtaaatactgttatcagtatatcacaatgtcattagtgtcccttcaagttaagggcatggaaataaagatggtctaatgtgccaggccaaagaggaaaacttttcagcttagcaaagtgacttcaaatacatggggagaattgaagcagtcatttcaaatgcaaacaaaaagttgtatttttatggattacaatatccttagctaaatgtttactttggcttgggtatttttctcattagtgatacttatttaattagttgcttataaattgaacctgggaagtgtagtttgcagtgagccgagatcaagccactgcactccagcctgggcaacagagcgagactccgtctcaaaaaaaaaaaaaaaaaaaattgagtacttaagatcaattaaaatatatcgagtattggatgctgtcacataagagtgctattagccattggctgttaaatttcctcatctccaggaatctcaggcacctaaaaataattctctttacttcatgggcaacagcagccactagtctttgccacgactcttctgtcaattgggtatgcagtgaggggcaccaatatggttttaggtgatgatgtgaaattgtttcaaaatgctttcattctcccttctgaattttgtcttagtctatgcttccataatattgggagccaattagtagtacatgccttcctgcagcttgaatagaagtgaagtctattatgaacaataaagtcaattagagggggccatgcctactgataaatatgttatgtaaagactcaatttaccttgaaatctgtatctatttgcatctactctttagtgctagttcagagctctgtgcgattattttaaatgtattgcagtattactttaatcaattaatacaaaggtagattaaggaaactttactactcttcatttcttcattctgctgattcctccctcactgaagcaaaaaaaaagtctacaatttagtctttaaaaagtctatagtttagtcttagatatctctttgtactatattccatatactgttcattcttaccaatgaatagtatatatagatatattttacttttttaaaaaatactgctttattctgtgtattattttaaatataacagtcaattagaaacatgttcccaggtaatgtatatagatcttatacattctttgtgaaagtcttagatgatgaatcaaaatgtattctattattcttctacatttctggattattatattttgattagaaaaggtggcctatcaaatctttctttttgatgcttttaaaagtttcctctctatgtaatttttgatgtcccaagtaaataggagaatatgctttttccagtgtgcacaaaatacggattaaatttagcttgtcggttttaaaccacctctattcttgttttttatttgtattttttgtctattttaatctaacaaattacagaagagttgtatgtaaggtaccaactacagctatgattttatcatgttctccttttatttctagtaatttttaccttatgtagaatgcacccaattgtttggggcatagcaattaatgactactgtgctttgggaagaagtgtgatttttgtcattacaatggttctctgagacccatttagtgcttttcggtcttgaactatacttcatttgatgctattattttgactttcactttttaaaaaatggttttctaaatcaccattaacgcagcattgtgaccttgtatttttatgtttcttgtgactttcactttttaaaaaatggttttctaaatcaccattaacgcagcattgtgaccttgtatttttatgtttcttgtaaacagcctatagatggagtgtgcattttaaactagataattttgtctttttaacttatgcaaatatttttacatctttatagggtacatgtaatattttgctacatgcatagaatgtataatgattaagtcaggatagttagggtatccatcatctcaagtatttatcatttatatgtgttggaaatagttcaactcctctcttctaggtattttgagagatacaatatattgttgattatagtcaccctactcttctttcaaacattagcacttactctttctatgcaactgtatgtccgtacccagtaaccaatctctcttcacccattccgcccacctacactcttcccagcctctggtatctataaaaaaaaatcacatattcttaccaatacgtgcttgatcttatgaagatataaaaatgatagatagttcatctttagatgagacattttaaccaacttcatttttacaataactcttataactgtgtctgttttaattccttgtcatattgatggtcattattttatcattttatttactcttatcccttgtctataattttataattcatcatcttcttcactgcactctactgcatctcttcccgcacttataggttatttataagttatactttgtactatcattttactagtgctgtttcccattttaaacaacaattttatgcctatatttctgtagtgttgcgccaaaattaaataagaacaatgccctcatcaccaagatgatttacttagtcaactcctcattattttcaatcaaaggcaaaatcctttaaaaagaaataatttataattttatttcctggctactattgttttcacttgtagtatcacatactagttcaagatgtcatgttattacttaaattacactatcacttcataaaatttgaccacaaacgacacaaggtgtatttcctgtcactgtttttttgtaccgtttatttctcattgttttgaaatctttattacacagtcatccttcagtgtctgtggggcactggtttcagcattttgatatcaaaattcaagaatactcaaattatttatataaaatggcatagtgtttgcatgtaactatggacaccctcctgaacacttcatatcatctctagattatttatagtacccaatacaatgtaaatgctatgtaaatagttgttatgcagtattgtttagggaataatggcaataaaaatgtctgtacatgttcagtgcagacacagccatccatgtatttttgcaaatgtgttcgatcgatgactggttaaatccacaaatgtggaacccatggatacagagggccaactgtacttcagttttaatttggttggaacacatgagaaatgtcctcgtaaaaacataaaggatgtaaactttgtaaaccttgcattttcgaaatgatctttgctttgcagtcatcatgatggatttattggatagtaacattctttaatatctctcctctttttttagtagtctctgtaggttatgaacaattgtcttccagtttccattgttttcttgtttcaactatcttcaagctactattgtttccagtgtaaagtctgattctagtccaagtatcatttatttgtatttaaccttttttctttctctcaaactctaaagttgctgtctgtcccatctattgaagtacagaaatttcattaagatataattttaaatgtttctaaatgtgtccctgtttattattttattttattttattttgtttttatttttgagacagggtcttgctattgcccaagctggagtgccgcgatgcaatcatagctcactgcagccaccaactcctaggctcaggagatcctattgcctcagcctctttagtggctgggactacaggccatcagtaccatgactggctaatttttaaaacatttgtttgtagagatgatgtgtcattatgttgcccaggctggtcttgaactcctggaatcaagtaatcttctcacctcagcctcctaaagtgctgggatttcagttgtgacccaccacttatttaattcttttttgcacttgggtaacgttttaaataaccaattaatattaataacttctttagctctggaaaattttctattatgattgttttaattattacaaatcttccatctcttcttttttctcattctggtacttatcattgcttaataggtatcttagatctgttctctaagtctcttattttttcactattaatgtcagtttatttctatttgtctttaaattgtgatatacttcttctggttgactgtaaagaacccatattttatttttagccatgatcattctcttttctaagttgtctattgttatttaaaaactaggtaacaggctttctgtgctctaatgttaaccttttaatgtttctaattttatttttattaaatgtaccttccgtatcttctagtatactacttgtatggactctcagctttgtctttctctccagccccttgtgtcttctgaaaaagcctttgctttattttctctcatgcctaagtcaaagaatgtaaaatgtcttggcgcaaatgcagttaaggttttgatattttgatgcatagtgattgattgagaagcaacatggatactggaagttttgttgttgttgttgttgttttgatctgatgaataattatttaacaagctgaaacctattcacaaaatttacatatgggaaaacatctctgatctcatggacaaggggtggaagtaaggctgtcctcaaccatgtagtacagccactctccagtaatgcctgcatgaaacaaactagcaggtactgacccccttcttaagtcaaacagatctccttaaatcaatggtctccaacagatcattccacatatatacttgaaaaccatcagatccatcatttctgtctcagatcgtgccaagatacacataactttgaaatatcaccagttcatcatcattctctcttcacctgcaatttttttttccataatttgaggtcctgatacatatattcttctaaattgtagcagttagttgtgattatcttgacgttgcatggactcagttcaaagtgaaacagaaaacatatctacgatgtgatttacccattctcaacatttctattttgtgtgtctgtatttgcacagacacgtacatacatacatgtgcatatatataattaataagctttgaccatataaataatgcaaattatgtataattcacaataataggtttttaaattaattatcttcagagttgagtgagattacttacagatttaggctgtgtctacctgaaaacaaaatacagtgtattagcaattcagtaaaatcaattggatatagaataataacaaattagttgagttttcaccttgtgacattttagtttggatttagtagcctgtctaaattacctttgtgaaaaaactaggctacaagtattttctgatagatataataccagcattagaattattcatataatcttagttttcacattatttaaaatagaacacattgttatattttaataagcaatttgaaaaagaaacaaatctttctttcttgtatgattgccattataaaagaatattaattgagtgctcattaggtaactttaaccacattaagtactagacagccctttggacagagactgagtagaataaaaaacgattacagaacatactttggtattaaccttttctataaataaaatgtattgtcattctctagattagcactgtcctatagaactttctgagatgatggcaatgttctatatctacactgtccaataaagtagctattgaggctactgagaacttaaaacatggctagtaaaaacagatgtactaagtttttaattgtatttgcttttaaataatttagatttacatttctttcgtcaagtgtagctaatgactaccatacgggatagtgtaattatatgcatctttactatcactcgcatttctaatgaagagaatacttccttgaaaaacataattatgacacatgcatatttagacatagatactgagttgccgcattaatctagagatagtgtccacattttctgaggggtgtgacaaatgtaatatagaaataaaagtgtgagtttattctgaaaaatctactcaagttgacagatccacaaggcaacagaagttaaaagcgatataggagggtgaaatataactgcagtatttaaggtctttccatacttattttttcttgtgttacttttattttcacactgaattaagtataagtatgtgtgtgaggtggagggagggttcgatttgcttgtcaacatacaaaaagattgctatagcaagtattcccaagctgaaattttggaatagcttaaaataaaaaatatatactagatatgtaaacgaaaacttttatgagaagagtttgggaagagttatcaaaggttaaaatgattttttgaatacaagtcttctcatacccttcaatttgctaatagacattatgatacccatgaagaagctaaaatcagtatatcttaatatcgtctatatgtcattacctcaaataattgcttatgtttgtattcaagtataatgagtcagattagtaactaaaagacaatttaaggacctaagcacgcatgtacaatagcatgtagctaatgtgctatgaattgaagaaatgcgacatagtgaaatcagatataccttttaaatctatgacaataaagattgcattataaaatgaagaaaatattcctgtttgaattctgaatattcctaaatataaattataaatgtaaatcccagcaattgtaaccacatatctatcttataattatcctgttaagttgatacttgttttttcattaatttatccaacaaatatttttgataacatactgtatgctaggtactaggcatgagtctttgctgcatttattttttgctgccttataagttggctagggtgtataaccttatctattaatttataggttattttttggagatggttttacaaagcaggccatgattgttggtgcttatatattgctgcttatgtgttgatacttatcttggtggcaaccaaagcccttttctttctcttctctcacaggccatacttagtgactaaaattttatcaagttactaatttatgttaattctttgaaaatctgtataaaaatgcaaatgttgtcctttgaaacgaaagactttaaaccactataagccattaacacattttccagattcagtttatcagcttaatttgatagtaattgagcttggccctgaggaattaggtaaatttcatggtgtagaaagtcagaatccacatgaggcaggtcaatgagcaggtctgtccagaccttttacataggacactatttatacctggccttctagaagcagggtgtatttaaagactggcaaatccagcatcatctgcatatctttttcgctgacagcctgccctgctttaaaaattaattctaactttagaaaataaataatatgggcataaaggatgattttctttcatattttaccttgactattttgtgtatgttagtgagttttattctttttaaacaaagggggtaaattgttcattgattctgaataattattctgagatggacaggccctttttttggttacatagcttcacataagcaattttttagatgatgcaataggaagggggaaatcacataagagcaaacactctctcattgctattttttctatgcacggtcataaccaatatgcttagactcattagattgattattcaacatctttctacccagtgacttgactaaaacagacaaaacgaagtactgtcagaatgctgttattgtcatgccattatatgtatccaaaacagtgacaacgcagattaaaaccatacccgtctcacctgcatcatgttgttttgtttttatgctttattgtttggggttttttaatcaccctggaccaatacaatatttttgcctaatttgtttgtgatttgcatttttatgcttacaatgcctattataattgtccaggagaaataaataaaaaatctctcaactttgtttattactgtaatgattcctagaaggaaacttgtctttctctgaagacttgtggggctaagagacagagctacttgtctaagacttaagtctttcccattgccttttcatttatgacccatcagaacctacttaaagcctgcagtcctattttggatttacatatcattgtgttattacttttaaataatccataatatttaagaatgtccctttgaggaaagataatcagatacaaactgacatactttcatattatggctcatagattttcatattatagctcacactaaatcattaataaatcttactttgaggatttgcttattttcatcttcattaacaccaacgcagttaaaaaaaaaaaggctccatcactattttactgtttttggtcaagataatagtctatttttgttacacttttgatgcattgatatatttttcatgtgccatatttatatgagatatatagttattttgtggcatatgtcataatcatatgtcatatagcacatttttcttcttgagtttctttgacctcataactcataaatgggccagtaacctcaatgcatttaaaggagaaagaagtcttttaaatcatggaggaaaacattttgtttaaaaacctagacataatgcaccatttgtttcaaaacaggattgcttttatcctttgcagttatggcccttcaagaaacaaattttatgtaatgaaaagaatgtgataacttaagtttcagatgaatgaaaatgtattcaaaactttgtgagtgatacctgtgcctatttacacagctcagaatcttaaaactgttttgactttaagtttagatcatacaaatcataattgtgttctataatagtcattaagcattgatcgaacttttcatttttaaataaaaataggcattttatggtttctttcacatatctttttgtttctagaaaatgaggctagtatattctttggggtatatatggttaaaaatgaaaataaacacaaagaaataaaatgaattaatcagattatagcatttccttgctaatgatgcatgagtatctataatgatataaggtggtaaagaacattaacaaaagcaagttgattttcaaaaggttagacgggatttgtacacatcagaactcagaaggataaaattattcaaggcagagttaatgaaattcaaatgaaaaggattaatctgaatgagtacctggattttgcataaagaagagaaaatgaacatgatatttctaattacactgatttttaaataactgtctgaaatttttattaaaccaaactgaaagtcattcaatggatgtagttttctcattatagattcgcatgactgtgtcaataggaatgctatacttttaaggaatagatagcaaactagatctccaaatgtctggttctcttttgattcaatttctggtagtttcttgtatatgaaaattacaaaaaagtctatatattaaacattattgtatatatcagattgctataataaatgagaatattcaaacttaataacacggaattttctagaaaatgagttcacagtttcccagtggtgtcaaaaagttattttggaatatttctatttctcaagaaagttcacaggatcaacccttagttttctctagtcagctgatctgtaccacttagtgtctgttatctgtgatgactggacactacgtatcaagatagtaaatctttcaatagatccgtcttcattaaatatatttaaagtataacattaaccttttagactttataacgtatagctgaactgttgcccataggtaattgtaatgagaagcatcttagaaattacaggtattctaatttatctttataatggaaagaaaaatttttgaaagattacttaattatcagtagttgaggatagaaatgatttttctcattcagatttttctaaagtaataaactatacctttttattgattatgttcaaccataagaattttaatatttctaagtgttctagaaaatgtgttcatgccatggctgagcatgtagggattatttccatgtattgacactggttgctctatggcttatttgtgacaatcttgaaaataatcacaatatgcatattattagagcattctcaacctgcagttcaatggctaatatttcttttaagagtatttcgatcaggttaataagagcttcttcattatttaaaagtttgtaaaaaatgatttctagaaccagatacagaattacaattatttgtcacttaggtatctaaaattttcttaaaaattgaactcttgtacagagagtaaaaggatgattaccagaaaaattggcaatttaaatagatgccacataacactcttctaaaagagattttctttgaaagataggtgaaaatggtttttagtttaatgttctgaagaatatttgttaaatcggtatataataatctatggtagacacatggggtcaggtggagagaagcttaacagatgagaagccagggtatggtgtgctgcctacattctttaagccctggtttaggactatgattaacactggatcttatttgctgagacacagaattctggtctgagagcacgaattattattttctaagtgaatctaatttttattttatccagtgtcactgaatgattttttctttttttttttaattatacttaagttctgggatacatgtacagaacgtgcaggtttgttgcataggtatacatgttccgtggtggtttgctgcacccatcaacctgtcatctacattaggtatttctcctaatgctatccctccccttgccccccacccgccaacaggcccctgcggccatatgttttcattgttcaactcccattatcagtgagaacatgcagtgtttggttttctgttcctgtgttagtttgctgagaatgacggtttctagtttcatccatgttcctgcaaaggacacgaactcattcttttttatggctgcatagtgtcccatggtgtatatgtgtcaattttctttatccagtctatcactggtgggcatttgggttggttgcaattctttgctattgtgaacagtgctgcaataaacatacgtgtgcatgtgtctttatagtaggatgatttataatcctttgggtatatatccagtaatgggattgctgggtcaaatggtatttctggttctagatccttgaggaatctgcacactgtcttccacaatggtggaactaatttacactcccaccaacagtgtaaaagagttcctatttctccacatcttctccagcatcagttgtttcctgactttttaatgatcgccattctaactggtgtgagatgctatctcgttgtggttttgacttgcatttctctaatgaccagtgatgatgaggtttttttcttatgtttgttggccgcgtaaatgtcttcttttgcgaagtgtctgttcatatcctttgcccactttctgatggggtcttttttttcttgtaaatttgtttaagttccttatagattctggataatagccctttgtcagatggatagattgcaaaagttttctctcattctgtaggttgcctgttgactctcatgatagggtcttttgctgtgctcttcagtttaattagatcccatttgtcaattttggcttttgttgctgttgcttttggtgttttagtcatgaagtctttgcccatgcctgtatcctgaatggtattgcctaggttttcttctagagtttttatggtttcaggtcttaggtttaagtctttaatccatcatgagttaatttttgtataaggtgtaagaaaggggtctagtttccgttttctgcatatggccagccagttttcccgacaccatttattaaatagggaatcttttccacattgcttgtttttgtcaggtttgtcaaagatcagatggttgtagatgtgtggtgatatttctgaggcctctgttctgttccgttggtctatatatctgttttgctatcagtataatctgttttggttactgtagcattatagtatagtttgaagtcaggtagcgtgatgcctccagctttgttattcttgcttaggattttcttggctatatgggcccttttttggttccatatgaaatgtaaagtagtttgttctaattctgtgaagaaagtcaatggtagcttgatgggagtagcattgaatctataaattactttgggcgctatggccattttcatgttattgattcttcctttccataagcatggaatgtttttccatttgtttgggtcctctcttatttccttgagcagtggtttgtagttctccttgaagaggcccttcacatcccttgcaagttgtattcctaggtattttattctctttgtagcaatttttaatgggagttctctcattatttggctctctgtctgttattggtttataggaatgcttgtgatttttgcacgttgattttgtatcctgagactttgctgaagttgcttatcagcttaaagagtttttgggctgagacgatggggttttctaaatatacaatcatgtcatctgcaaacagagataatttgacttcctctcttcctatttgaatatctttctttctttctcttgcctgattgccctggccaggacttccaatactatgttgaataggagtggtgagagagggcatccttgtcttgtgccagttttcaaagggaatgcttctagcttttgcccattcagtatgatactggctgtgggtttgtcataaatagctcttaatattttgagatttgtcccatcaataactagtttattgagtgtttttaacatgaaagggtgttgaatttatccaagaccttttctgcatctattgagataatcatgtggtttttttggtcattggttctgtttatgtgatgggttacatttattgatttgcgtatgttgaaccagctttgcatcccagggatgaagcctacttgattgtgatggatatgctttttaatgtgctactggatttggtttgccagtattttattgaggattttcttttttgttgtgtctttgccaggttttggtatcaggatgctgctggcctcataaaaagagttagggaagaatttattttcttttgtattgcttggaatagttttagagggaatggtaccagctcctctttgtatctctggtagaattcagctgtgaatccgtctggtcctgggcttttttttttttttttttttttggttcgtaggctattactgcctcaatttcagaacttgttattggtctattcagggattcaacttcttcctggtttagtcttgggagggtgtatgtgtccaggaatttatccattttttctagattttctagtttatttgcgtagaggtgttgatagtattctctgatggtagtttgtatttctgtgggatcggtggtgatatcccctttatcattttttattgtgcctctttgattcttttctcttttcttctttattagtctggctagtggtctatctattttgttaatcttttcaaaagaccagctcctggattcattggcaaatctcatttttatttaacgttcctttctgcaaataccaaaatagtcaaaatttgggtttgaaatttcatttaaggaagttaaatacaagttagcagacaaaagtgagtatattttgagtgtctttttcttcattatatttgaccatacagctaagtttcttgctggctataatccacaattactatatttattaagcaccaatatgaatttaagatagctgagagcatctcaaatgaaagtaatgaagactgagaaaactacatatcaaagaagaatcagaaaatagataaaaacatcttagaattatttttcttttaagaaaaagtgatgaggacatgcatcaaaacttttctgaattcccactgcttttgttaaggccacccagatttttttctaaatattttcaagatatgtccaattctgaaacaactcccttgattaaacaacaaaacaaattaataaataaatgaaaaactacaacttgtcttctacttactctgttcctgataacaaaaacctttgttttccaaaaacttacaggtgtaaaatgtatcattaaaggcagatttaattgcaccattaaataagtattataagaaatacgcttgctttagatgatgtgaagctatctttactgcaggggttatagcaactaacgtgaataagaaagacgagcttattaacttgtaaattttattaagaacaacataatggtcaccaaccaatgtaatgcgtgcaaaacacaagcttgtgttacttgtgctattgattctactgtttaatgtgtcagtgaaaatttcacattcaaatagcctgctgagttatttttcttttaaatgtgtaaaatgcttatgatgaaatagtgaaattaagaatttcttaagaaatctgttaaattctgaattttatttatcaaactctggctcaagtttctaatatccttttaaatgtaaatgagaaatatatatacattattccattgaacatgaaggaatgtgtgccatggatttggcccagatatacacaataaaacaaatgttgtaaaaggtataattatttaatagctaatttgtgcaattctgtgaatttgctatatcacaagtagatgagatatctaaattagaattacttcattttttatatcatgtaagaattgagtatgaaaatcctaggtcagagaaattaaaaacaaaacataaagtgaccagcttgtaaattttactcctctttgtgtggggttcagtctagtatccccaaagtccaatgtattacattactgcaaaaataagtatggtgttgtcataaaaggctgtgcagtaataaatggctacgttagcatgcttatcgtttgtacttccccagagaccctaccactgaaaccctcaggtgacctcatcaacaggcaggtggcagttgatcaattctagacaaagttattgggagaataatttcaattacaagaattttgctgcctatagtgtagacagaagagagcacaggtcatccatctttctgaatttgcctgccaagtagtatttattttttgctcttataaagaatagggaaagatgtattactgggaaactccaaaaggactctggagctggaaattctcatcatgtctagcacttggatcccagtcagaaaagtgtaggtgcaagagaagaggctagtgctcccttatatatcaggacattctggagttctttttaaaatataaattccgcagtcagttctgctcatatagcagcttcattagcagcttaacttagcaagagactagcaacaaaaacaggagctaatgtctagaatttggaggagaagagggcttaatacaaagttacataccagcctaactacttcgtatctgttgtatctcagtgaactttcctatagatacaggaaagttgcctgtgttaggaataaaacagatatgagtccccctcacccaatcccatatctagatttccaggaaaattagaattttaaatgccagttgcaaattagaattagaaatttaaatgccggttgcaaaaatcgtctttttcttaggataaaactactctccttatgacctcatggtctttcgtcttatatttatggtgctaatatgtgtgtgtcacttattatgaaatgcttttaacactttctggaaaaagtaggtatataattaataaatcaccgttttactagacttaccatcgtgaggttttgaatccattttcagcccagtttgtagattcaattgtcagctgtagaatgagacctatataaacttaatggaggaggtttcactgttaggaagctaaaaaaaattgttcttttgtatatctataccagcacactgtccgtgaagaaacgatgatggtgatgactgaagacatgcctttggaaatttcttatgtgccttctacttatttgactgaaatcactcatgtctcacaagccctattagaagtggaacaacttctcaatgctcctgacctctgtgctaaggactttgaagatctctttaagcaagaggagtctctgaaggtaaaaccaaagcactttcattcgtattttacaaggtgatcatactgatcattcatagtgccagaacaattgacttaaattgtatgcatcatgatggcattttgactttcacatggaattcttaaaaatacttgatagtgtggttggcttcagaaatctagggtagaaagacataagttagaaaatgtattttacaatatttagctttgagagacatcctaaaatgaagaaatgcacaaaaatgatcatttttacatgcagtagggacagaaaggaaccaccagtaaataaactttgatggaagaacagtttattcctagttaatggatgacttctgtttcattttccaaaaagggaaattagatttttcatttatatgtaatgtatattgtttttgttttatattttttatgtatacatattcaatttcaaattaatgtcaatacctgtgctataacatatggaataaaattgaatagaaatcaataaaatattttctttataactgccagttaaaggctaccaacaaaatccagctgttttcaaaccaccaacagcaagttactaaattctcaagtaaggcaaataatgatgatgaaataggctatgaatttcagaaggcagtgtctgaagataaatgaatgtaggatcaagaaaatgcacataataatgtgtctccagataattttcatgatcgtacattttacactcaaaatgaaatattatagtatacccagagcttggtattttcaaatgcaaacagtatgtgattataggcaaaagatgggtttgctatcagcagcacatattagctaaagtattttatactcaaatggtttcctggaagctcattctatatcacacatttgcctgtatgaatatacaaatggataaagctatttgtttgttttggaaatcggtgttgcagtatcttcagtgacttgactttaatatcttaacattatatcaaataagctataaaattacacagtaaaataagagcttcacagatctctggaactattccatccatgtcagtgtggcactgtttcttattctgtttgaagtaaaagtcaaatcacttattggtacaatgaagaaaagaaacctaatcagttaataaaataaagctgacatgccagaattcctgtcattatttctattaactaagttctcatggcagcatagtttgtaagtgcatcattgtcattcaataagtaaattattgccaatgagctaatatccattccttcccaggttcatggacatttggttcaggagagtagtgaccctgatcttattaagttgcccattgaataactctgtctccatacctcttagcctggcatactcagaatgttagacccttggctacactcacagtgaatcatttgttcatcctgatctatttaatattattatagctgatgtcaatcgtaatagtattgattactgcggtttataatatggtattattgtagatttaatttagctaaatggttgaatccccataagatacagttgtgggcatgattccttctgtctcccaacaaatctccagcaggtgaatgggcttcctaccttcattgacttttttgaagggggatagttttgagctcagtcttttcagtgaatatgtatttcctgttaaaggcattcatcattgtcattatccagtagtaaaaatggaaaagcagtgcataaattgtacagctgctggttgggaaggtttgaaattgtggttgattttattcctgacagatatgcatgaatcaaattacagaactatagtaagtattgctgtgctttaacatacatcttttttgaaagtgcagtacaacacaaataatatgtaatatgttaaaagaattactttctaaacaaaatacaactaaaatagcacgtatggtttcaatagatgtattgaattggaaagctacctaatcatgttgacagagactatgcagataaacacaaacatatatatatacgtatatatatatacatatgtggaaatctgcatttaatagcaaaaacactagctaaggcagagctagagaagaatgagaaacatacacataagtaatattttctttcttacttcagagccaatattaacagttaattgattgtgattgcttatatgtacaaagttaataatactcataacagacaagagtacataattttagaagaattgcaattttttggaagtttagagcaatattaacttgcatttcatttttaagaaaaaatcattttcatgataaaattttccaaaatataattactgtgttaaaccgtcaaatcctgccttaaagtatctcatatgaaagcatgaacacagaatttcttagcatcgtaagttttaaattaccaaaaggttttctctggagagagttaaatatttgaaagcttatcctaaaagcagaaatgatccacttaaaagacttaactgaaaggatttatcatcatgtgtccatatgcctaattttactgaaagcatcagttttattggaggatgaaacactcttgggatgtcacccatatcatttcctgactcagcatgccttgtactctgactggtagctgccagatccaagtgtctctgactgtttgccttagggctctctctagtaatcaaagctcatgagtgtcaggtagttaaagttctgcatcccccgtgttccccagcaaacctcaaccaataacaaataacttttggtggataaataccactactcactcattcttcagttagggtaactctgaagcatgatttatgctctgacccaaaattctgttccaggattaagaccccatcgcacacagtaaaaacctgcctcataggatacatttcacttgctccctgtcctaccttacacacactttactagcacctccttggatcattcccaaagacatcccttgtcttcgaatctgcttataggggaactctatctaggacatttttgaaataaataatgacatatttactgtgtagttagcatttacgtagagaaattcttagaaatagttcatgcctttggagtggaattcttcaagtgattctgctgctccctcattcagggaatccttagctgttcaattaggccttggtatcaataaatgtgaatttttaggacaaaaataagaacatagcttataataagaatgacaactatgctttaccttttgcaataatgagaatcaatttacagctaatattattctttatggtagagcagaatgtcttcacctgaagaacatgaacaagacaaggatatctgcccacatcccttcaatattccacattgcactggagtttcaaatcactgaaaggaggaggaaggaagggaggaagtaaggaagaaagagagtgagggaaggagggagggagaattgaagaaaagaaataaaataaggagagaaacaaggaggaaataaatggaaggaaagaaaaaatatcaggcacacatcatttcagttgtctcatcaaaaccaattatagtacagatgccttgtttggaatgaataaaatgtgctatactttgggtaaccaagagggtgatgaaaaacgtggccatatgaagaaagctcacgggtaggagacatggtggtcctaatgtagattttaaataggatcaagaaatagagacaacccttgttcaagttcgagaccacaagggaaagctggtagtgagcttataagccaaagatagtgtgaagccaggtcgttcaagtcctcttgagttcaggttttttgcattgctcttgagaaacaaaaaattgttaggacaagtaaacctaaggaatgtggattcgtatattccaaaaatagttattaagctcttagtatgtaccacacactattctaagtgcttataaaacagtgaaaaagactaacgaatctttgccctcattcagcttttattataacattgggagacagaatagaagcaagcaaacaaagaaaaatgataagtaaatattgcgtattactaggtgatacgtattttgggaaaaaaaaaaaaaccagaatctgttaaggggatataggaccactacaggggtagacgtaggtataattgaaagtggcggaattgccatttcaaatagggtagaaatgacctttgagcaaagattggaagaaggtaagggagtcagccatggagtctgtgtagaggaaatagagtagaggcccaaatgtgggactgagcttatcttaatcaagcaccaacaagaaggccaaagtggctgaagcaaaacaagccagtggaagggtagaaagagatgaggatatgggagttgtgagtgtccagattgtggagggcctttggggccattgtaaagaagattctaaatgagatgagagcaattgtaagtttctgagcagttgagtggcatgatctcaatcatgttttaaaaggatcacactggcttctgggttgagagtagaactgtaggggaccaataatagaatcaacaagagttgaaaaagagatgctggtggcttggacttggtcggtagtgagagaatgtcagattctggaaatattttgaaattagagatagcagatatatttctctggtcatacagaaacttaagcatgtgtctatgaaaacccattctcggccgacttggggctgagttagaactttggtctcgtaaaacctagcagaagatcccttgagagatgtatgatttcttctcatattttagtcttcgattcttcagtcttgccttgaagtagggacaaaagtactggcaacagagatttttaatacactggttaagatctttctcctctggaatctgtttcacagctcttaagcacaaatttaataatcccaattagttaaatgaaggcaaaattatgccatgagcaaagtgactgcttttctattctggtattaggagaattagataatagcaagaggcaccatatgtagaaatccaaacaaaatatctgaaggaaaataaaagaacgattgtttatatgcgtattgtaatacaggggcatattacattgtttatatgcatattgtaatacaggggtatttaataatattggaataagaggacattgcaattactctaaataatcatggatcatataaaatttcaaagcaaaatttgtttgcaaatgctttttgaattcgagttgaattttctaatagtttaatagttctaacagtttaatgcgtggaaaagatgatttttattaatacattgtgactttgtagaaactgatcttttgaactatacataaacatttgcaataatgtgatcagtggtttctcttagaaaaattgagtttttcaacacatttatttggttataaatataatttgtttcttcaacagcttatatgacttgggatttatttgattgatttgctatatataaatgtgtgtattttcaaatattaatcattaactgtagtttaaatcatgcttaaattatttccatagtacattatttttcatttgtattatatgaaaagatttgtactatagagaagagattatagatatttactgcctttcagtcatgcccagctcatatttatatgtgcttcggtacagttttcttttatattttatacaaatctctcttgtaggaaattatccattctttatccccaaccattattttatcaagcctagcagttgtcctaccttgactattatgctgcaatttactcccaactctgctaaaatgtactttaagaacgcactcctactccttccattctcccagcagcactgttttcataatccccatcgtgtaaagtgtagaaagcagaaacttccatattaaaacttacaaatcatgaggctggtagaaattttgaagttgcagttaagttgtggggaggttttccttttattcacaaacggttgaagctgtgcttcgaccagttataatgtcgttttttatgtgtgatatataattactgattcgttatttatgcaaagacaatgcatcatcctatgaagaatattttggtccaaatacgtagctgtgtttagaaagtgttttctcacatggggacaataaaccatgaagaaaaaattaaaaggtcaccttaccatagagccaccaaaaataactttttaactttttttggaagctccgtaaaacctagttaataagtactttaatgccttttgattgaacacagttcccaattcgatatgtcattaatgtagtgcctggtagctggatgggatgtgaagagtgtaagaattagatttatatagggtgttgcctttatctgtcagataaagacaaattccagagagtgaaaatgaactggagtttgagtctttggttctcttatttctctttttccattttaagatagatctactccccaacggccgctgtcacaacagttactaatgggtttttctaatccttttttcttagaaatgaaagttatgtgctcctctgttaaccaagttacaaagtgtctcaaggcatttctgatacctaaaactgcttaaagctattattttcaccttcccaaaatatgacgacaatagtgcctagagttttataagtctataaacactatacatgcatttaagtatatgtataacccatgtaactgcagtgctacatttttcaagaaggtgatacatacacacagccaccaggaagaaaaattagtatcttgtttgttgtttttttcctccaccactgtatctagaactcctagaacagcacctagcacttaaaggtactgaatgtacatctgttgaattagtgagtgatggtctgatacatgtaggtgtggactctgagatagaagaagacagggcagtgttagtaagcgctggtactaaaagagaaaaccaaatttacttctttttatattgtatcctaactcactgagttaaatcatctagacatgtgcattctacaaatctatatgcatataagcatgaagaaattgttctaggtttgtatatactgaatctaaaacaatcatttatgaaaatgtgtgacagggaacccacatataattaaaacattactaacatttttccacatcagtgagctttcattatgtggttatgataagcagtagagtagagagtttagcaaagtactgtattggaacctgaaaagcttagaaagatttaacctgattgttgatagttgtacccttgggcaagtaacataagatatttaggcctgttttttaacgttgaaattaaatcagtgataataactgcccctgcctactcaactgtactcttgtgaagatacagtgaaatcatgtacgactgtgtaggaaaattcctgttaaaatgtataattatataaatttcaagatttgtaaaatgcatattgcttcatcaaacatcccaaattctaagaaagttataaatttccacgtaaagtatcctaaaaacaaattacctttaagaatgtgttaaacattataaaattgcatatttatatcttaaaaaactgtaaataaaatgttaaccacataaaatatacgtaaagttatttccagatgtggcaaatattctaaagctaaaaaaactttaaaataagagaatacatacaagctaagccacgtttgcttttgacaaaatcttccttagaggatcttacaaacttttgatcatattcttctattgtacagaatgttccttgacttgtgatggggttatatccagataaacccattgtaagttgagaattttgtatgcggaaatgcattcaatacacttaacccaccaaatatcatggtttagcctagcttaccttaaacatgctctgaacacctatgttaacctacagttgcgcaaagtcatagaacacaagacctattttatagtaaagtgttgaatatctcattcaatttagtgaatactatactgaagtatggtttcgaatgaatgtatatcactttctcaccaccctaaagttgaaaaatcactaagtagaaacattataagacgggggccatgtgtatttccgaggctagttgttacttattcaggagtaatttttttattcttctatttatttaaggtataaaacaaataactcactttattgtatatttatcttgaggtgcagaaatgcaactctaaattattccaagattctgtgtaccataacttttaccaagaagaggatgctgttttctagcttggttttaattgttgttttattttgggctttagtttctttatgaaatgtgttgatttattttttccatttctagttcagtaacttaaaacccattgttctaattgtgagttcagaaccatgacaaaaattattgaaaaatattgaaactctaagcaaagaatgatttaatcagtagtgtttttttctcttttttgctttggagtcttgaaatttgcttttgttgtttattttttgttgtctttcctttgccatttaaaaaagttagtttgtatttattttctcctggttaaatttgtaaccatgaacatattaaaattataatgctattccattgaaccttatgaattgtcaagtctttcaaaaggtttaaatattggcaatatcttatagtttaatacaatgacttgtacccaagtctgcttatttctgaatattaatatatatcattaaacatcctgatggaaaaaaaacaagaactttctgttgtaaatcacgtatgattaacagacaccaattcccaaatttaatttgccaaaccacaggcaaaaattaaatagtgttatcagtaaggaaatctatggagcttccaaaaaggtaaacattgagtagagtgttagcttcctgctcccatatcatgccttttgtttatttcttttctttcttttttttttttttttagatgtatgcatttgggtacagaacaattgtatgaaagagcgattttgcttttctgtcccctgtgtaaaacaatatgatggaaagcacatttccccaacatcagaagtattagttatatataaaacgggcataatattaccaaatatgttttctgttttaccaaaatagtttactgtcatcaatattaatttttgcaggtttgattatattttatcatgtatggtagctacctatgaagttgcttaatcatttatactaaattttcatttatcaaaataataagatgctcatgattgcatatgtaaatagaattaaaaagtataacatgaattttaaaaaagcatattccattcattggtgatcatcagtttttgaggttttcttggattgttgtattgctttggaatttttcctccataaaacctacctggccctcctctgctgagtcacacaacactaaagcgtatcctgactctaagaaatttgggatcatagaatgccatatattttgaactaagagaaaagtacttacttctataaaaccccctttgccatgcatgtgagtcaatttttctatttggattttctgtaaaatgatttaggcgatgtgtacaacttaacacaaaatgtacgtatcataaaaggactggtaaaattgttttcaatttacttagtgctgatggactagaatcattttatctgagaaacacttggatcagtaaagtgcagggttttttttgttgttctttttgttcttgttgatgctctgtggcatctggagaaatgggcaggtgtaattctgaataaaggacttttttcttagatatctaatgtgctgtgaggaaaccataaggaaactcagccaggaaatgcatgtggacttctattccactgttcaacagctaatgtcttgtaaaagtaaagtagaataaacaaggaattacctgaatagctcacgtctgaccatacctgaatatctatctacaatggttgaacagagtaacaaatcttagaggttcaatgattgaattcaaattggattttcataagcaagttcaactcaactttttacttcaagtcaacagatatttattaatgctacaagtgctatgcttaacattctaaaagataagaaagaaatattaaggaataatccttgtactctggtagttgataacattattgaatatacatattatagttatacaaacaagttagagagtaataaagacattaaggacatcatccaagcaaaaatatataagacatgagtgtaactgaaatcatgaaaagaagaaagcagcacaaaaagcagaaactaggaggaattttatagaggaggaatccttagcttgaggtgtgaatataactggaatctggactaatcttgaatgtaatagctgacagttattatttttgtgccaggacacattctaaacacttagagtaacttgtatggtcatcataacagccctacaaggaaggctgtattattatacccatactcagatggagaaacggaggtcctgagcagttaagtgacttgctcaggtgagatcatttttaaatatcatagttgaagtcccactctggatgttcaagctccagagtttctgctcttaagcactacgctatacagtttcttgatgcagaaaatgttttcaaagttaaagatacaaagtcagtaagggtaaaaaaaaaaaaaattgtatcagaaggatgtgtctgaagaataacaaagagattaatccttcactttgttattcactttgattatcctttcaagtgtctctgctggcaaagcactaggaaatcaagttggataaaaactgtgaatccagttttttcttttttttcctggaaaaaaagatgggctaaaagatgggcttgaaagtgtccaaaaagctatatgtcatcatggatggattttggtcagggataatccttaaaatggcaggataaattggacacaaggaaaaataaagagataaaacaataagtaaggagatatttgtgttcagcatagctggaccgatttataaaccatacccttgattcagtagctgtaccaggactctcattattaaagttcactcaggagatgcccaacatcctagatcacccattttcctgtgttagtgcaaaatgtggactggatttcccgatacatatttctatctagttaaataaatactctgattggttaaggaaaggttttctggaaggtgtatataatcccaccatggcaacagaaccaagagtctctgactgtctaccaacctgtagacttgaattttttccctgtactttcttctagcttcttcgatttctgttatccccaaaacaccttgatgtagccttaagcagaatcaaccatcaaagggctaactccctcctcctgctgggtgccttctctgttgggccccagcagcagtgaatctatgctcccaacttgacatttttcttatcccctttcccacctcccctaaataaaattcctttgtgtcaaagtttgatttaagtgatagaaatggctaagattgtctacagggttgggtttggaagaaaagaggtctggaaagggaatatagcaaaacatcagtattttctgagcaagtttggaagagattaaaaattacccctagtgactctcaaatttatatctctagtcaagattcctctcctgaatcatgacatatatatatatgccttttatatattcacttagaagtataataaacatcttaaatttagcatgttaaaatcttacaccctaaccttatcctcctgcagttttctacactatagttaatggcaactccattattccacttgtctgtgccaaaattcttcatgttatccttaaggcctttctctaccaacacacatgtaattggccaccaaatcctaaggattctgcctttacaatgtatccggaattcaaccctgcctccactctgatccaaagcaccatcatctccagcatggatgattgcagttgtctattaacaagtttccccctcattgccttctcccctgtagactctactgtcaatatactagccagagatacctatttaaatggaaagtcagattatatccccctttctgcttctgttcaaaacccccaatgctccccatccccctcaaagtaaacagggaagtccttatgttcataagtaccttcatgggttacccaccccattctctgatatttctctggtagtcgctagctcatacactccagccataatcacttcctccatgttccttggccactcctccaggcacattccagtgtcagggcccttatacttgctttacctgtctggaatattattctcatgatttttctttcaatggttaatttctgcatttccttcagatctttacttaaaaactgccttcctggtaaggtcttccccgacccctcttacctaaaattctgacccccactttatccttcatttcttccttccctgctttagttttgctcctcagcacttaaccactatctaactgagtatatagtttagtcatttctctatttgtttactttattctcctgtagaaggtgagattccagagagcggggcttttgctttctggatcactagtatatacccaagatataatatatgactgtctcaggctgggcgcggtggctcacgcctgtaatcccagcactttgggaggccaaggcgggtgaccacagggtcaggagttcaataccagcctggccaacgtaatggaacccgatctctactaaaaatacaaaaaattagccgggcatggtggcgggcgcctgtaatcccagctactcgggaggctgaggcaggagaattgcttgaacctgggaggtggaggttgcagtgaacagagattgcgccactgcattccagcctgggtgacagagtgagactctgtctccaaaataaataaataaataataaataaataaataaataaataaataaataaataaaatatgactgtctcatggtaggttttttcaacaaatatttcttgagttaatgaatgaatacagcgatgtagctgtcagacacagagagagaaacctagaagatagtattactagttaaaactagtgtggctaggtctgtatgatgaaaactgtgcctaactgtactgaatcctgccaaggagggaaagatgaaatggggaagctattactaagtgagtgaataggaatttccttcaggaaataaatatggttaaaaatgtgaattataagtgcttccagctgtctgctaatgttagtccttcagagaaatgaaaactgagaaaccattagaaagcaattttatcacttcttttaaaaaataaagttcaatatatttcaaaccagaatatcatcgaaatactgaagtcattttcaggggaaaatgccctgaaacaacaatttcatattatcttatattttaacttatgcttttatacatttgaaattttatttcatttgaagacttttttctaattgaaatttttgactgagagaacactcacaacttctgatgtaaaattttattactgaggaaaaactgttaaacagaagacaaattagccaattaatgtttgtatatacatcccacagtggacatattatttaaaatcttggaaagagttgtagatttgtgaaggtatatgtgagcttatttctaggtatgaaataagggagcaaagacacttgtaaattatagacatccttatttagtaattggatgttgaagatgaagaaatggctgaattgaatgaccacagagacgggacagaggaagtgatgtttgtttgtttgtttaattgtttattgagacagagtttcactcttgttgcccaggctggagtgcggtggcacagtctcggctcactgcaacctccgcttcctggggtcaagtgattctcctaccttagcctcccaagtagctgggattacaggcgcccaccgccacacctggtgaatgtttgtatttttagtagagacagggtttcacatgttggtcaggctggtctcgaactcctgtcctaaagtgatccacctacctcggcctcccaaagtgctgggattacaggcgtgagccaccgcgcccggctgctattttaaataatagaactttggcacttttcacagtattcgggaagcaacgagctttgctataggtacaaaaatatatttaaaacttcagtaaattattttaagtttactttcatcaaaagtgattaacagtaagttcaatttgtcagatattactctcccctactctagttctcttcaggttctgcaatatctactttgacatttatacacataagtttaccatttagatggtaaaggcaggctctgcaatgaaaatctttgacagcaagggagtagttgtcactttacattaaatggaagaaaaactaaacagtagaagtctatcccttatgataaagaatggagcatagttaagggttgcttcatacctttatcttaaactgattagttggcaaataggtcccttgtttgtttcctagataaattttctgtattctctggcttctccttttatcctgttaaagacacatactccacaacacttgaataaacaaagcatttttatgttcaaattatttctgtatgtgtctcctttaaaaaccaattatcttcttaagggagagactcacattttaaagtctttattttcatatctcacatttgaggctgatattatgtctgtattatcaataaacacttatttaaacaataagcttttcaaacagataaatgaattgaagccacatggcttatagatttctgcttttccttactttaggtatctggatttcatctgccggttgtaaaagttactgtgctatctaatttttctctattcacagtgcataatcagggtcttctttaacttattggagactgtgaatcagagatgcaaatatcctattttaaaatattaaggactcgagttgtataaattcgtgtacagatgcctttcagaaattaaaattccatttgtatgtatatttagaatttccttttgcagaaagagtggccaaaaataaacatcttacagaatttcagcggaatagtgaagtggtcaattcataggggcatgtcaaaattaagaagggatttgactaaaaagttggtactttatcattttgacatcatattttcagataagataaggaactattcagggagagaaatagaaatgctatattctatagtgattctagggatgtttatatcgccatagcaactacaagggactatggcttcctttttagagggtcagaaactataaagatcacttatttctagacaaactaaaatagtaaaatactatcagagatctcatctctgactttaaactatggaaagtgctacagcattttctttggtgcacataccatttttctgtgtgcagtgccttgaggacacgaatatgtgcagggactttaaaaaggatgtatttcctggactccagccaattttgacagcattctctgagaatgcaccaaggagctattatctagatatccagggagtgtgacatcccctgccccagtttttgctttttgcttttctcctttaagatagaaagttttcccgcgttagtaacatgctgtacagcattgctaaaaccgttcataacttgatgctgagcaatgctacagcattccaaagaattggtagctccccagagactcagattaaaatcaggaagctttgcaagctcaaatcctcagagagtatacatacacacacatacgcacaaacacacgcataccatatcaaagccataactggataacttttatatgctgatggggaagatcctttatctcttcccttgaatgtttttctccatgggtgcttacagctatgcatttaaagggtttgggcctgctatgtactaacaaatgtgattggttgcccaatgtgaatttaagtaatcagcctttcattcagctggagtcttggtatcaggtggaggacttggcagagttatgtatctttgccattggactggcagccaagcaagaatgatggagacagtgacttaaaagaattcagagttgaatcaagtacttgtgaaatcaggctgcccaggtcaggcaagttaacagaagcagccaagaagatatgttggtgcacgtttctggtacctgacctaatcaggctagcggagtagccctaaacattccacccaagactccaggcttggagccatcagaagatggtagtaaaattctaccaggtaaataaaagtaaagaaataatactagagatacgcttgagttcaatggcttttagggcattaataacaggtattacatccattgtatctcttttattataatttcaagtgtattttagattcaggaatacatgtgcaggtttgttacatggatatattgtttgatgctgagatttgggatatgaatgaccccatcacccaggcagtgagcatagtatccaacagtttctgttttattatgagttttgtttttatcaatatgaaacttttcttcaataagcaagcctctgatgtcaaatacagcatactgcaatgtcgtacaaagctattttctattttatagtgaaagatgatgacagcaaaagacagtctggtctgcctacatttatgttttccacttccaacatgctgttgttgctctcgataagatcaccaatgacctcctaaattgcccgagctgacttttccctcctggtcctggctgcatctgacttgttgacaactccctccctccttctggttctcttcctgggtctgatgactattattctttagggatactcatctccttcctctgcccatgctttccacataggttcatctttatgctacctttcttctcactcttttcaccctaaacacctttcctgagcaatctgaccatccctagtcttattcaacatcacacacattccaatgactatcaattctctatgtgaaattgctaaaagacagttttaacctgcattcctccagataagtaaattctcagattgtttctgtgttggcttgttctttcttttgtatggtaatacctgacctgtcagataagtactttttccacagagttaaattgaggtgcgaaacaaaagaaataatgaaagctttccatcacaaggtgtacatagactggaagagaatgccttgaaattttattttaaaaacaccttctttctctgaaattcactcacatcacccataaccattgtatcttatcctgttgctgagctgataaataagacacgagaacacagttgctttttataaggttcccattgtaagcattgacttttaccttttacaactgacattatctgtagtctcacctgcctcttcagcttagttcttgctcaaggcaagtcctcgtggaccacaaacgtgaaatcttagaataaggcagaaaatcctctaagttttattgttaacttctttcctgtttccctctctgattgtgaagttttcttcagagcccgtcatctggaaagctgtacgatcagcagcagtcactccctatctaacacagtctccaacttacaaatgattaaaatgcttcccaattttgactgaaaataggcaagaatattccctttgttttgggaggctgaggcgggtggatcacgaggtcaggagatcgagaccatcctggctaacacggtgaaaccccgtctctactaaagatacaaaaaattagccaggcgtggtggtgggcgcctatagtcccagctactcgggaggaggctgaggcaagagaatggtgtaagtaaacccgggaggcggagcttgcagtgagcctagatcagaccactgcactccagcctgggtgacagagctagactccatctcaaaaaaaaaaaaaaaagaatattccctttgttgatatttgttaaaatttatatttatctagtcaggaaacataagatctctggatgagagaatacatcattaattactcaaaagcatctcagggcaagatgtttatctgtgagtgcaggggttgtagtacaggagagaaatcccagaattgtggatcttggagattatatagagcacctgatgtatcaggaggagagaaagtgagagagacagacatacaggaagacagagactttgctctgggctataaaccaatgatctaggtctattatttttggaatataagttgaaatgtaatcaaagggctcttggagataaaagtttttaaatctctccagagcaatgcactaaactccaaggtacgcttgccattcagtcaccctttaagacagttactacaactctttgctcagaaagcctagtccatgtatccaaatgtgaaaatatgtatggctcagcaatccctgccatcttactcctcttctcaaaatctgatttcaactgcctctggaacatctacagtttgatgcctcaaaggcttttcagaatgaccatgtccaaaattgaactgatcacttatgcacacatacacaagcatgtaaccatggaacctcttcatctgtctgaaatcctgttacccaatgacaccacaaatcatgtggatgcccaggccagatacctaagactcattcaagttcttcctcttcttcacccaacacacagtcactgaattctgctgagctgttttcctaaacttccttcccacttcagctcaaatgtgaatagcaactagatacttgattcaattaatgaacttttgttaagactgtaggtgtgttaatggtattatatatgtactttccgaaaaaagttctcatgagagaatatttcagcaagagaaaaatgctgaagtatttatggagaaaataatatatcagtttgtttcagaataatctagttgaagaggtgagtgggtggattgtccatggagtcataacagttggcactggattatagggttatgggagctatttgtattattttcctactttcaaatatatttgaaatcttacataatgataactttttaaaaatcatagttccccattagctactgaagtacaggcagaattttctgttgagattcaaagcacattattgaacatcctcagcctctgtttcatgccccatcttcccctaagcttctatgttactgaaaaggcagccaaatatgactgcgcttgttacctagctttgcgtgtgtgttacctactagctctaatgttcttcccacttctactactcagatatgtctactgcaatttgcaccttcttcgtgaattctttcctgagcctatgaccaaatatatgatacatgttttctctaacttctagaaaatgtttggtaccacttggaacactcatttcttccttcttctcatccagctaaggcttctatacttggatttttttcttcaattcttcaaaccatatcctttcttactactacaataaaacctacttaaaacttcttaaaggcaaactaaactgtgtttcacccacctttgtttctgctatattgctccttacacatgggaagaactcaataaattttgctcagtggaccttatgtataatttagatgatcaaaataacaaaattcgtactaggaagaatagccagaatgtagtttttagcaaatttattgagaataaatatgtttagatttttctttcttcccgtataacccatttgtggtttgtgatttttccgttaaatagaatataaacaaaacattatggattaaatttatgggaccatctattcatttattcaacaaaaaagcttttgccatctatcatgtgccaagcacaggtttgagctttggaagcccaacagataacaacatccctgtagtcatagatttcaaattagtggtatataccggctacttgatatatattttaatgttagtaataagtactataaagaaaagggaagagtaatgccaggaataaagagtgattgctggtgctatttaaaatagagtagtagagaaggcccctttaacgtgagaaagaagtaagggaaccactgatagaaatgtgggttaggaaaactatttttggcaggtagaacagcaagggcagaaatcttgaagcaagaatgtagttgttatactcaagtaatgcaataaacctaatgagggtgaagtgttgtggactatgaagagactgggaagagatgagcttggaatggtaggtagtatacaaccaagtcatgtagagatttataggtcatagtgaagattatgcttttttaaaaaaagtaaaagcaagtttattaagaaagtaaaggaataaagaatggccactccgtaggcagtgcagtggcatgggctgcttgactcaggatacttgtagttatttcttgattatatgctaaacaaggggtggattattcatgagttttctgggaaaaggagtcagcaattcctagaactgagggtttctcccattttagaccatattgggtaacttcttgacattgccatgcatttgtaacctgtcatggcactgctaggagtgtcttttagcctgctaatgcattataattagtgtataatgagcagtgagaaggaccagaggtcacttttttcaccagcttggttttggtgggttttgactagcttatttacagcaacctgctttatcagcaaggtctttgtgacccgtatcttgttctggcctcttatctcatcctgtgactaagaatgcccaacctcctgggaatgcagcccagtaggtctcagccttattttacccagcccctattcaagatggagttgttctagttcgaacgcctctgacatatttcccctctttcttttacaagggaacccttaatcctaagggtagtagagttacccttaggattaagtagtagaagggtaatacatcttctgtaacttcttcaggctgaatatgggtgatgatatttctgcctaactattagggtctcttgtattcagggtagagaggagctcagtcagcaagcatcagcttggtgagggccattcataactgataaatggtgatatctggaagattagtaagttttcaatctaagaaaacattgagtaagcttattctgcattcctatacaaaaagtaaaacagcaaatatattccacaacagtaaaacacaataagtaaaattatcccaagtaaactaaattagaaggctttccgtgaactgggcagctgttggaaccaaagtgatgtggggctgctagctgattccaatacatgcccagaattagaatactgatccaggtttttatattacccatccttcttgtttcttctgaggtgcagtcagagatcactggcaggttcacaggaataagcaggatcagtctatattgcaggaaaaaactcaaaaacagctgacgagactaataacaggtgtaccatagttcttaaaacataatttttttctctctccagtctcccatttttactaaagatggatcatcataggactgatttgctttattatacttggcctgattatttgtataaagtgttgcaagaataattatttttcatgtaggcttttgaaattggctgtgattgaactctgtgatgaagagccaccagaagattttgagcagaggagtgatatgatcccaattatgttttaaaagaatcttttcggctcttgtgtggagaattatccagtaggggggaaagagcggaagcaagaggaccatttagataggtagttctataacccagatgagagacaataatagcttctatcagatctgtagcaagaaaggtagtgagaagcagtcaaattctgcatatgtcctgaaagtcaagccaaaacatttgcccaataatttgaatactggagactgaaaaaattaaggatggctccaaagttgtcaatctgagtaattgttaattgaattactataattcaattgaaatcagtaattgccatttactgaaatgagggaatctatgggatgagaaggattaggaaatgcagttcagaattttgtttgcgtcatattaagtttgaaagtctcgtgagacctccaagtgttgagaaattagcatttgttagactggagttcggaggagatgtccgggcttgagatacacatttgggtgtcattgtcttatataagatatttaaaattatgagaacaaatgggatggattatggacagagaagaaaagaagtgcaaatactgagtcagagcactctaatattaagatcaggatgagaaggatccagcaaaggaaagcagaagaggtcaggatacagaagccaaatgaaggcagttttaagatgtagggagcgatccactctctcaggatgaggtctgtgatttacctattgaatttgaacatgtcaaagtcactggacttcatggttattaactttaaaaagtcaataattaagaattgcaacaccatttgctacctttgggatttgtatatatatatatatttttctctttctatagacagctaattcatttttttactgttttaaaatttttatattacagaatataaaagatagtctacaacaaagctcaggtcggattgacattattcatagcaagaagacagcagcattgcaaagtgcaacgcctgtggaaagggtgaagctacaggaagctctctcccagcttgatttccaatgggaaaaagttaacaaaatgtacaaggaccgacaagggtaggtaacacatatatttttcttgatacttgcagaaatgatttgttttcagggaactgtagaatttatttcagtaccctccatggaaaaaagacagggaaaaagaagtatcactctcattgaaaaatggtaagtaaaatgagaacaaataatgatgaacaattcagacaaatgagctgaactgtagaaattattcagtattaaatttagcgttatgttgaagcattatatcttctaaaatttcaggtaatcgtaaatcagattggggcattgaggtgctataaacagttgttcgatataacatatttatctttagtcaaatctgtatctacaaatttataggagtttgatacttagattaacatgtttaaaatactacctatcaataaaaaaattgattttcatttatttatattttggagggtgacactttacactttgcattaccctcccccacatttttttttgccatggggaatttgttaagttgatttaaaatcatgtttctttttatcttaattgaaatatttagctgttgacttaattggggggtggcagaaattcaattacattatttagcttcacatcacaagaagtggattactctttcttttacatttttagattaaaagtaataaagttctctaacagcttaaagtgattcatttcagaagtctttatcctcaaggtaggcttcttaattattctcagaggaaatcaaatcattcgtctaataattatagggaacctccatggtatctcttacatctgtccatttctaaccatctttactcctattttagttcttggtttactacatcaggcacctaaagagagatttctagcattaatctcagttgtctcaagtgattatctccactttgttctcaacgatctttcagtggccgtcatttttctaaagtgtaagagctttggtactataatctcattcccttgagaatgaaaccctgactccttaattgtgcaaaattatctggtcagcctcactgcttatttcttcgtgcctgccctatagcaagcccctccaattatgttctagcgatattaaatcaatttgcagatgcccaagtgttttgtactccctctgacctgcctgttcttcaggtctcacttcagatgttgtctttttctagaaatcctaaaactattagtcgctcctaacatctggaaacttggatattgtttcatcatttaatgtaatttaatatcaataaatcatttatgcatttgtaaattttccagacttggtggctaccgtgtagaatatatgatctgatgtgcctgctcctaaaacctaacacatagtaatcaatttgtttacttttctgcctcccacacaagctccttatagaaaagggctatgttttatttgtgttatatgctcaggactgatatagtgctgagcacaaagtgggtgttcaatgtgtctggactcaagcctcctctccgaaacctgagaatatttcccctttggatagtctaccagatttatctcactgcaccttccagggcaggtgcggtggctcatgtctgtaatcccagcactttgggagtccaaggcgggcacatcatttgaggtcaggagtccgagaccagcctggccaacatggtgaaaccttgtctccattaaaaatacaaaaatgacctgtgcgtggtggcatgcgcttgtagtcccagctactcgggaggctgaggcaggagaatcccttgaacccaggaggcagaggctgcagtgagcccaaatccaccactgcattccagcctgggtgacagagcaaggctccgtctcaaacaaaacaaaacaaaacaaaaaaacagatttatctcaacttccttgaaaatagctggtcccacagtatccaaagccaggcttgataaaggcaaagaaactcagccactctgtgtatatgctacaaatacaaacttaaacttataaaatggtggctcatgcctgtaatccctgtgctttgggaggctgaggcaggagggtcacttgagcccaggaattcaaggctgccacgagccatgattgtgccactgtactacagcctgagtaacagactctctctaaaataaattaacaaaaatatttgaataaacttatatcgccaccatggtgtactttctcccagcatttcacattgagacattatgaggctctgcgggctactccaatgatgtcagtttcattaccatcttttgggatgttcattccactcttgggaagttcttccccctctggtttgtcttcttatagtcagtgttttctccaagcattctaggccacccacaccatcccctaaggaccgttgaggtttcttggatagccagtgattactgtgcttctatatacacctaccagttttgcactaaagtagaaataacgctttctgctttttgaggtttctcctccgctttactcatgagtaatttttggcaaatgatccaggtattcccttctcactgggtcatatggacatttccctttcagtttaccttcaccttagacttaaacagaaacactaacgccattccacagagagggtcgctgaaatctcaccccaactctgaggacttttctggttttgacaaaggatagagtttctctagccccaatagatccaccctgtccttatccagaggttgaaattgtacttccattgacattctataggaattggtcaggagctgttaaatttcctatgacttttagtacaatctcagatacaaactgttttaagtaattgcttataagcacaggctctagagttccaacccgttttggaattctggcctttctgctatctatgtgcccttgagcaagtctcttaaatcttctgctccatacatttctgatgtataaaataggataagaatagtgtctatgtcacagggttgttatgaggattatctgacacaatatatgtggggagcttagtgggttgcttaaacacgataatggctcagttaaggttggcaattttgatgatgaaaatggtgatcttatggttctgatagtcatgatatctgttaattcattcttacatgctttcaaatttccctgagaactacagagagaagaattagactcagtccctgctttgaagagcttcacagtcttggagagaaaaggcacaaccagccagtaaaataagggttgatagactggagctgtacaagagggcaagaacaagatccctggggaatggaatgaagctatcttactaagaatggggaataagtcaaggtctatagaccattcaaggttctgagttacaactaacagaaagtgactctagttactttaggtagaattatataaattactagaaggatatcagatacctcatggaatcaataggaaagcctgagagctaggtttaacaatgggcagaaactataaaggaagagcaggctaggcatccagaatatatctactatcaagctatgaggtaaatctgaattattttgctgtcatgccagagtccattgctttaccaggagcaccattgcactggacattgcttgctatcgtcactgcaaaaaaaaagtatctaaattatttattcttgctgtgtgtcgctcattctacaactagggtctctggcagaagcatctgatagtcagaggatggatatttttttctgtaaaggggcagttagtcgatatttttgtccctgcaggtcatgtagtctctgtcacaactactcaactctgctgttttagggtgaaaaaaaccatgtataatatataaatggatggacatgttgtgtttaaataaaactttatttaccaaggcagatggcaggctggaattgctgatgggccatagattgatgactgctgttacaatacaggtttaggccacagaactaggttcttattgccagagatcagggaaaataaatagctgaatttgttcttcattgtagtggcagtcaacacctcgtgtcctactaagtcccatacaatggtagattcttgaatccttggagagatttagaagctatgcattcctgaatacacaaatgttcagtacagccttcatgtggtgttctcaacaaaaatctgctgagttttttagtaagccaatttgggttaaatcaaaataaatttgagctagtaagaagggctatattggtatttttcttaaatggtacatgtatggtagtattagctatgaccgcaataatgctgtgacacaaatcaccctagaacttgctgactgaaaacaacaggcatttctggctgtttaggttacttgtaccttgactgactcagctgggcttggccgggaagctctgcttcaagatgtgggttagtagagctaggttccatgatgcatgttggattaaggtctgctatatatgtctttgctctggacctaagatgaagggtcagtgacatgttttcatgaccagtcaccaaagtataaacctaaacctcccaagaacactcatggcctctgctcctgtgaagttcactgacatttgattggccaaagcaaattacgttgccaaatctgacatcaatagaatgagaaagtagactcttcctacagtggaaggggggagagatgttaatatttgctgaaccataattcaaattattagagatagttaataatttataacaggattgttttacagctagaaaatgccttagtggttttgccctgcttcattattttataagggagaaaactatatttcaaagatgttatgtgacttgcctaagcacatactaaatagtacatctgcgtatttctcgttcagtcatctctattaaatgtcataaggtaaaacagacattacgctttagatgagaacaggaagatatttaaaaagccagactaatttatgactgctcattcattatctaacatacctgcttccatacattgtctttcagcaaatagaatttcaacatgtatctcaacaagttacacatcatcaaagtattaaaagccttattttcacggacattctgattgttcactaacagtcaacacagtcaacagtaaatccacaagcaccatgaacgtatggatagatatgcctatatgtaagattactagttaactttttgggaaattaatattactgctaaattcagttttcattgattttcgggtgggtaactaactgcttataaaatatacctataggaaacatgtaaaaacaaagaatttacataagatctatctgggattagagaaacaaagctcttttcttctttcaatgaacacttaagaagggcctactaaatgtcagatgttatactctattgtcgttagtttctttctgataccatctttactatcctgtaagccattagtgagtgtttcccacttttagaaaatgacttcccaaagactaagagggtagaacagttcaaatgctatcatcaaaatgaaggcagtttctagactacaaattgctgtacagccataagatggcattattgtgtaacaacaaggtccctgtcaaacatcaagaaagtaatgttttaaaatcagtatttccttcttggaattctacttagtcagatatgttgggttgacttacccacccatataagtagttaaattcaagatggttctgagctttagatatgatgtaaaatagacatgagactaagagtatttatttctatattattacatttctatagcaaaaaaagaaacctctaaaaaaattagagaaagaagtataagggcatttaattaatcaaatgttcttattaataatatttcataaaataaaggaaatgttgaaaaataaaatatgaacacagtgttgtataaagtaagtcagaaataagagaacacttactgtatgaatctattatatgaaactaaaaaattaggcactttggagtttagaggtcagataggagttacctttgtgagttgtgattaacaagggctgaagcaggcttctagggactgggtaatgttttgtttcttgatgtggatgctgcttgcattgatgtgtttcctttagggaagtttatggaaccatacacttgtgatgtgtacacatttctgtgtgaatgctggactgaactaaaatttatacttacattttaaaaataataaatatgtactttaagtacaggagggacataaatcataattgttttaataaagaaggtgtagctttaggaaaagcataccgcattgttctatttttggcatttcaccatggacccctgaacattttataattgcccagtacagcctgtcagataaatatgtgggcactactgctttagagaaagtattttccaaatttatcaccaccattctggaaccacagttccacaggtcattaggatgctgagggtgggacagttggaagctgcttccccagggatttctccattgttcagttctcatagcagtaagcctgcagcattaaagcactcacaggctctggctgccatttgtgctacatgaagaaaaatgagaaaatgaaagaaacgaaaggagagaaaacaggagtagaaaccaaataaatcagattcgaagagaaagtccctaatcgtctctgtattcagacagtagggaatgagcatgcaattctgcaagcccattcctaatgtgagtttctgataagaatttgctatctcagttgtaatctttctactgagacattcaataaataattttctttcatgtcaaggtaaggaaataacctcacattacccatataaggaaagaatagtatactaatcctcacgttatcactatagaattttatcttttaaagtggaagctagagggacagatgcataatctgggagcttttccagaattgtttgttcctaaatgagacattcagctatagcagcattagcagcctcttctatttgtcacaatgccatatgtagttgggaagatacatgataagcacatacaggatgctgacaactcacgaaggattatcattgcagtcttagaattaatctctaccatatttgaagatttttatgcaagactggatcttcattccacaacccaggtataggtatatgtgccaatacaaaatacttactgttggtttctgagcttggtagaattaggaagtaaggggtaaaaaacaagcaagtcctgaacttaagaaagttgttcatatcctattccatggccactgttttactgactggaagaaaggaatcccgtggattcagtcatggggacaatgcagaagaagatacagtagacagacagagaagtacaaatttctatttatgttccacttttcaaaattttttatctttaaatgttatttttaacgtttgtgggtacatagtgtgtatatatatatatatatatatactgtatatatatatatatatactgtatatataaacacacatatataaatatatactatatataaacatatactatatataaatagatttactatgtatatacacacatacatagtgtatatatgtggggtatatatatatgtggggtacatatatatatgtggggtacatatatatatatgtggggtacatatatatatgggttacacatatatatgtgtatatatgtggggtacatatatatatatggggtacatgagatgttttgatataggcatgcaagtatcatggaaaatgggatgttcatcccctcaagcaattattctttgttttacaaacagtaaaattgtatttttttaattgtttaaaaatgtacaattaaattgttttgactatagtcaccctgttgtgctagcaaatagtaggtggtgttcattctttctaactattttttgtaccaagtaaccatttcaacctccccctcaacccccccactacccttcacagcctctggtaaccatccttccaccctctatctccaagtgttcagttgttttgatttttacctgccacaaataaatgagaacgtgtgatgtttgtctttctgtgcctggcttatttcatttaacacaatgacctccagttccatccatgatgttgcaaatgaaaggatctcattctttttatggctgaatagtactctattacgtatatgtatcacattttctttgtccattcatctcttgatggacgctcaggttgcttccaaatcttggctattatgaacagtgcttcaacaaacgtgggagtacagatatctctttgatatactgatttgctttctttgggatatatacccagcagtgggattgctggatcatatggtagccctgtttttagtttctgaggaacctccaaactattctccattttggttgtactaatttacattcctgccaacagtgtacaggagtccccttttcttcacactctctccagcatttgtaattgcctgtcttttggatatgtcgttttaattggggtgagagaatatcccattgtagttttgctttgtatttctgtgatgattagtgatgctgagcatattttgatacacctgtttgccatttgtatgtcttcttttgagaaatgcctattcgaatcttttgtctattttctgatctaattattagactttttcctatagagttgttttaactccttatatattctggttattaatcccttgtgagatgggtaatttgcaaatattttctccctttctgttggttgtctcttcactttattgattgtttcactgcggaggagctttttaacttgatgtgatccatttgtctatttttgcttttgttgcctgtgcttataggatattactcaagatttgttttacccagacagatatcctggagagtttctccaatgtttccttgtagtagtttcttagtttgaggtcttagattttagtcgttaatccattttgatttgcagttctctgatggccagtgatggtgagcattttttcatgtgttttttggctgcataaatgtcttcttttgagaagtgtctgttcatgtccttcacccactttttgatggggttgtttgtttttttcttgtacgtttgtttgagttcattgtagattctggatattagccctttgtcagatgagtaggttgcgaaaattttctcccattttgtaggttgcctgttcactctgcatcaattttgcatcaatattttttgcatcaattttgcatcaatatttatcacatggtagagttcagcagtgcagccatcgggtcccaagcttttctttactgggagagtttactaaggcttcagttgtgttactcgttactggtccgttcaggttttggatttctttatggtttaatcttggtaggttgtatgtgtctaggaatttatccattacctctagatttttcaatttgttggcatatagttgctcatagtagccactaatgagcctttgaatttatctggtattaattgtaatatctcctttctcatttctgattttacttatttgggtcttctcccttttttcttcattagtctggctcaagatttgtcaattttgtttaccttttcaataaaccaacttttcgttttgttgactttttgtatgttttctttattacaaagtcatttatttctgctctgatctttattatttctttcttccactaattttgggttcgatttgctcctgcttgtctaggtctttaagttgcattgttaggtgatttatttgaagtttttttcttttttgatagaagcacctacagctgtaaatttctctcttagtactagttttgctgtatcccataggttttggtatgtggtttttctttcattttttgaagacatttttcaatttccttcttaatttcttcatagacccagtggtcatttagtagcatattgtttaacttccatgtgtttgtatagcttccaaaattcctcattgttgatttctagtctcattccattgtggtcagagaagatgcttgatattatttcattgttactgaatttttaagactgcttttgtgacctactgtgtggtctatctttgataataatctgtgtgctgagaagaagaatgtgtattctacactcattgaattaaatgtcctgtaaatattagatccatttattctatagtgcagattaagtccaatgttactactttggttgagcttctgtctgggagatctgcccaatgttgaaagtggggttgttgaaggctcctgctgttattgtattgaggtctttctctctcctgagctcgaataatatttgctttatatatctgtactccagtgttgtatatatatttgctttatatatatatactccagtgttgagtgcatatataattgttatatcctgttgctgaattgacccttttgtcattatataatgaccttctttgtctcttcttacagtttttgtcctgatatcgatttggtctgatataagtagagctagtccagctatgtttgggtttccattggcatggaatatctttttccatccctttatttccagtctgtgtgtagctttataggtgaagagtgcttcttgaggtcaacacaaaattgggtcttattttttcatccattcagacactgtatctatttttcttttcttttcttctctctcttttttttctatctttctttcttttcttttctttcttgagacagcatctcactctgttgcccaggctggagtgctgtgacaggatctcagttcgctgcaacctccgcctcctgggttcaagagattcttgtgccttagccccccaagaggctgagattacagtcacccacaatcacgcgtggctaatttttgtatttttagtagagttggggtttcatgatgttggccaggctggtctcgaactcctgacctcaagtgatccacctacttcggcctcccaaagtgctaggattacaggcgtgagccaccatgcctggtcgagacactgtatctctcttgattggagagtgttgtccaggagctgagcctagaaatgggtcctcacaacactgtccagtgccctatcctactgtgactaagctggtatccaagatgcaagacagaatcctctttacttttcactctcctctccttaagcaaaagtaaggagtcacttttgttactgtgggctgcactgcttgaggtgggggaggaatggtgcaagcactcccttagccatgccagctggtgtctccctaggtcacatgccaccctagtcctctagctcttagcccaggctatgactagaagttatctaggaattgcagttcgtgtgtcccagactgcctctcaggtttacctgggactccagagcactttggcccacaatggtgaggcttgccaagaaacttgagttctgactgctgggatgggcgattcccttctggctggggctagttcaaatattccctccgtgcacaggcactgactgaggccagcatggcttttttctctactgtgacagcacagcagttagttcaatgtaaagtcccccagtagctgtactgtcccttccaaaagtgcaaagattccctctctgcactgcacgtccagtgctgggtgattgggaaggtgtggtgttggtgattcaagactgtgtctcctgcctttcctcaatgcctcttttagcaagatgaagttaaaaccaggtaccatgattccgtacctggtttttggttctggtgacagtgcttttctgtctgctcatagttgttacaatttgatgtttcagtgagggagattagttatataggcttctattctgacatcttgcaccactccgtctcacttttttgaattgttgaaaccatggtttatggggaaatgttctgttctggtttttaccctcaagatcttctttgaaaatcatgatttactaagtaactagttggatagaattcatttttaagaaaataatgaataagtagttcccttagatatagcaagcaatgttcttataaactgacacaccaaaacacttaccagttcacctaaacactgaaagtatttaaaaatttatttttaacctttaagtttttctccatttgagtatcttgtgcactatacgctctcctacatatgtctacaatctttggtctgatttattttattggttgttgaatgtcagaaaccacctgaattttgcttgtatatataatgcccagtagagtgcacattggtaatcaatacgacttgatgataataatggtaatgaacactataatttgatagcatcaacttggcatgtatgccagaaataaaccatcataaacttcgagaaaaacaagtctcattaatctgtcatttattataatctccctccatcaagcgtagcctctatatactgtcttttttgccatatgtaagtttcttcttgtatatttcagattagagcttgcctcctcccacacactatcttctatttcacactgctctgttcaagtgtttatgtttctgctgaaggctgtataatctaagataatccctagctattgtaaatatcattcactggccagtcattgcattttgcacaccactgagagagtgattgtgagccaaatagaggagattttgtttccacccagcaacccaaaatgaattgtgtgatttgactattgatgccaattacatggaagttttactaccagaggcaaagctttaaactgcaaaagattaaccccatatagttggtgtcatgaggtatttaatgtatattggactatcaaagcgtctccttacaacaaaccaattatcaatgaataatattcttatcttattgtgacttattgaaactctttaaaaaacatgaaccattcagcacactataccgtctaaattagatatctaaactagccttcatttacatttccttgtttagttttaaatataatttcttctgaattcttagttgttaagagcaggtggtgaaagaatttaaagaagaaaatttgttgtatttattaagtgaaagagctttttgaaatgcattaaatagaagtttgtttctgcccatcagcttatcttctgcatattcctatttatagttcaaagcacttaagagttgcagagtgatttgctttttatgatcaccgcttcatccaggatcatttgccttatatcttcaacattttcagattcttataaatcttcacagttcacttagaggttagtttaaaactttcttcagataagaaattgactagatataaaattcacataatctcagagttagccatagatcaatatccccagtctttttctcaaagtaattgaacatttttgtttcccaggatagttgtatacaagcattttcatcctcaccatagatgattcttgttcttcagtatatgaggggactgtatttgcctgcttgttatctaaataaacatttttattattgtcaaaggaaaaagactctaatacagaaagaaattttgtgtccataggactagcctcattttggaggctgatattaatatttgactttattcattgtgtatttcttggttttgtcatttcacaaatttcccttctctaaatatgcattttttctctacctggaatagatgagttttaaaagacattactgtaaaataaaactgtgctaaatgtacttttcccagaaactctctttattttatcaattataatttgctttggctaagtgttacagaagctcaaggtagaaatgacttaaataaaagagaagcctatttctttctcctgaaaaaccctggaagtttgcagccaaggcagatatgttggccccgctcatttctgttttctactgagtgagttatctttacttggtggaatttcatccacatgttgcaagatggagctctcatgacatccacattccaagaaggatgtaagaaggccagaagaagggtcaaagggtgcataccaattgtcttttagggaagtttcgtgggagctgccatgttatatttccacttacgcttcattggccagatgtctgtcacatggccacatctaagctgcaagtggggctgggaaatgtgtttatttcacatgtgctctgctaaaaactgttcagtcatgaaaaaaaaaaaaagaatattggaagagaactaacagtcttcaacatgtatatttaaaaagagcgttatttttcttttacttatttatttttttttgagtgagagtgttgctggggctggtctcaaactccctggatgaagtaatcctcccacctcagccttctgagaagatgggattacagaggcacaccactgcacccggctcctgttttgttttgttttgttttgttttatttaaggagccctaagaagagtgtaaaaagggcaactttgtctttagttaacccttccctttttttttctttcctaattttatgaactctgattcagcccgcatcttactctggcttactaaattctgccaatataagagtagaagttttcatcatttccctaggtacctactcttctgtttctccatattctcaaagtaatttctcattcatcaacttttgtctgacttagatttaagctactgcttaggaaatgtgagaaatggagaatttggttgtcatagcgctcctacttagagggctaatgctttcctaaattttactaaagttggatcctaagttatataagttacctaaatttaattagcaagttttgcttactaattcactgactaaccactataaaacaaggacctaagtttaaagctgatattatgacaatgtactgaaatttcaagacattactttttctggacacgtaggatggaccttgcataagataaaagagcttatttttaggcacacctatgtgccaggcatgggttcagagccttacatatatcatttcattctcaagagaaccttaattttagagacgaataattttgagttttagaataaataattgtcttaagctcacacatgaagtatgtgccagagtctatatcgtgaccccagttatgaattcttttccactacatagcctgcctccatggcatttcacataggatttcttatgctcaaggattatgttcttccttccagatctatagacatcagtagaaacaacacaaatacgtataatgactttttaaagtctcatatacaagaccaaagtactttaaaaagatgtttaaatttttgaaggtgatatctttatgttcgagatcagtagcagaaatggattgtaattcattacaagatgcttagcaaagccaagtggtaaaggattttctgatgtgcttgaggagtcctgacttgctccttagcaaattcctacacaccattcagcattcagtgcaaataccacctcttggaatccttctctgttcttgatcaattattccattgtctggattcatagaactctctgtttacctatttatcttacaggttattatcatgagtttatatgtcttacatagctgtttgcaacatgttaccattcagtggagtactttttcctacagggaagaggctgtactatataccttttgtcacccctaagtggaatgcagtatggtttcatgttagatgttcaatacatgttaatattttattgatgagcccttaaatgtatataataagcttctcactcaaaagctgtaatattctagaatgaataagtttcttgagaaactctttggttaacagaatctccatttccatcatagtgtattcaataaattattaatgcagggtaaatttccttatatttcctttcatttcgctatactaaggtcaaatcatgacttttaggtgtggatacagcaatatataaaataatctaagacctggatatatgtttttctaattagggaattggagatacatgaacagtctctcatagagaaaaatatatccattagtcactaaagtcagtataacattctggtgaaaggtttgcttgcttgcttgtctgcttacttgcttgtttcaccttctattctaggaggatgtttgtcacaattatgaaattctaacgctttaaaaatctgtttaccctatgaaagttgcaaattcttgcctgtaaggcaattttcacaagaattattttcatattagttttagtttatccgtggatagtctcaaattcctcttgaaaatatcagtgttctcaagggaaaactgcccattacaagccacagatgtggttttttgagagatttctgcctgaaatacaagttttaaaatattctttgtagtttcctagtatggctagatacttgtaggaaatgacaatttagatgcacatttgaaaattcttagcctttgagtaatttatatgtttgaataaatttaaactatctttgttcataaaaaggcaaattttgtctgtttgtcttgaaatgcttttttagtttcttcttcagttctttcacttgtctttctgtaatattcaaaattatagcatagtacttgaaaaccaaggatggtccagtctgtgtcctttgttttgaaggaattttggaatcatcagagatataattctggaatttctttgggtaccttccataaaatagtagcatcctgataaggacgtagatgctaacttttatttttatctcattttctttcccctatctctcagtaatgtaggagtgacccaaggtagctgtttattgggccctcaccaaagtcaatcaatattagtcagctacaaccacaataatgctgtgtgacaagcataccccaaaagaacaataagcacttatcctcatattcacaggcctactttgagtaatctctgattcagaatctgactgtaggttgaccaaacatgtctgatctatgtgtctcattctggggctcaagctggaatggcagtagatatttggggcacattcctccatggctgagttctaaagatctcagaagggtaagcagaaacacatgatggttcttaagacccagatttataactagcgttctctcttccatccatagtcaattgtcaaagcaagtcacgtggcatatccaaagatcagggatagagaaatacacttggcagttagtgaacccatttcaagagtgtgggtgtataacactactacaaaacagaactgagacttgcaacttgaaataccacaccattctagtagaattttattacagtattaattaaacatttttgataaaacacagacaactctgttagaaagcccaacttacaatttgttgatcccacttggaaaggtattctgaatccattttttcacaagttttctttctaattcaatgtgttggggtacttttattttacccagaaaagtaatattataaagcataaagttaatgccccctgtaaaaatagaatactgaaacaaactttaagtcacaattttattatttactgacttgagaatctccttgtgcttcagcacacttggtagttggatttccaaatagcatcatgactttccatacccagctgtctgctgctcaaaactaccataagctgactatcacagctcacaggatacccttgaagaagaccatctggtttatgtctcttggcaaaatttgtttaaaaacaagcagctgcatgacaaagtaagaaagagtctctgtctagctgtggtaaataagtagctttgcaatactcataataaagcatttttctaatccaagccaacatcttcaaaaggaaagcattattttcttacaactgaaagaaaaatctacagaattcagtgatgagggaaggactccattaaatttgtttcagcagcttgagatagtgagaaaaacaaaacaaaataaaaacctgtttgtgattagatacagtcttgtaataactagttttaaaagtatttatttagaatctaatacttggatattattttaattctttatattaagagatttacatttcataaaagcttgtcctttgaaccctaatactcatattgtgatggtgagccggaatgagtaaggtcacttactatatagtcggtatataataattcgttgaataactctctctcctcctgttactggcagtgaatccatacgggtcttcagcaaccttaattcatgcctcctcagaagaaagaattcgaccaaggaggcataaggcagaagaagagactgaggcaagtgttagagcaggaatgaaagtttatttaaaaactttagagcagaaatgaaaggaaataaagtacatctggaagggggccaagtgggcgacttgagatattaagtgtcctgtttgaactttgatttatggttttgtattttggcatacttccatggtcttatataccttctccccaattcttcccttggggtagggggctatctgcatgcacagtggtctgctgacacttgggaggggagcatgcacggtgtatttactggagttgtattcaagaggtgttcccttaccagtcaagtgtttccagaggaaggtcgtataccagttacactatgacattttgcctcttagtgcgcacgcgggagcccatttgcccaactcctgcgatcttatcgggaagctgctgatcaccaatttcaggtgtttttatctattgggagactgcctttccctggtattggctgtgaccaattattattttaaagacacagtttaataaccacctgactgaccatcacttgatggttgcctgacattcctggttggggtggcgggggtggggggtctcctaccctgctcatatctgactagctatctactgtaacactactattaggtatgtctgtatcccattacactcactctctattacaaaaaagagtaccttattcatttttcaaaagaatgagtgaattttctgctccagttaagtgcttttccttacctctatgtagagtgtcaaactagccatgcttaaggattgattctggtattaataatataaattcttgcattatgagtgtctcagtttgggttcttacataagcaaatcctgagacaaggatgtgagttcaaatagtttctttgggcagtgattctaggaagctgtggtaggatgttggagttgtgagaaagttaagagaaagcaacctgtaaagagtatgttatcaagccaaacaccactgtgagaactagggcttaattccctggagaaagtctgggaaggcataaaacacttgtctcagagttatcttagacaaggtgcaggagctgaggtgtttatatttcaactcttgttagtcacttttaaagggccgctcagggtgtcagggtattaatttcctcttgcaactacttccaacctgtttttgcatgtggttgtagctactttttctgcgtcaaagatagactttaggctaagacatgcagtttccggctgtaggacatcaaccagagtaccctggagtgtccaggcccaagataatgggtgagctccacctggatctgtggcaatgtgagggaggggcattattaccctagcaagggccactgcacttccctatccagctggtcactcttctgcgtatttgtgttacttttctgactcctgcattcctctggatcctgattcaccatcagcttttgtattctgaggcttgtgtggctgtgtctttctatttcttccttattgacttacttgtttaatcttttgctaatgtatacctttgatattcctatgtactcacctttggttagctctgtgaattattgagtcttgctttacagctttaaaaagatcatagccatggtttgttttttaagtgtgattcataacagttagtgacaaaattagaagtggaaattaaaggtcacgtgcacaatcctacacaagccaatttcttgaacgacataaaatacttgaatttgtcttttactatcaccaatatagaaataatttgggggtatttctcaaagtattgatttaacaaaactttatttttgtgtgaagattttttcaagtctcctggaaattattcaaattattgtctttaaagtcaaaggaaaggttaatattagggttacttttctttggtcacagaattgctggaggcttctatgacttgctttgaagcagctgactttatgcacagttttggttagaaattcactaccaattccaacattttcaaagtcctaaaagaccaaaagtacaattcttgaaatatccctagagaaagcaagaataaattagttttcactagaaatgaagacaaatttttctcattagttcattttgcctcatgatcagaattctttgccacatgaaaatattttggttaataggttgtaacataaagagtaatatgaatagagatctagcccaattagatgacagaaaaagagcaaagcttttgaaatgtataaagaagaaagtttaagagagacatgaacaaggctggatgtagtttaaggttgaagaacacagaaaaatgagataagtgaagttaagtgaaaatccttcccttactgagaagaaagagaactcaaaattatgtgaaggtttttgttttactttgttttgcttcttaataaggaaacaacagtggcaaatctggggcattaggaatggtggaacttctataacagtgatgtttcaaaggtcacaaaggaaattaaattgtagattgggtttaaaagcactggaattacttccagccccattttttcaggattttgtatgtagcaggaaatagatcaccgcatagctaaaggggagaatttaggttttaactggtctcagtgcaaactgcttcatagttcctttgcatttggtggtgtatgtaaaacatgaaaggtataaacatttattatcataactttattattatacaactatttattggctgcataggaccatgtgtcttcttgcaggtataatcaaaaataaaaagacagaaatgtatcttatatgaaggctgccattatcgctcttatcaatggccataaaatcagatttcttacatgtacaacatatgaaaatatattaaatatgaaacgttttccattaaataattctgtaaatgattttcataacatttctgtccatgatgtgtaaatctgtagatcaaatactgcaagtgtacagaacttaaaatgctttggtcaaaaaaattctcttattaatatgacaatggcgttcaaaagtaaaaaggtaaaaatacagtttagcattaataagtaaactcagaaagtaaaatatattgatcatacagtctgtattagtctgttctcatgctgctctaaagaactgcccaagactgaataatttataaaggacagaggtttaattgactcacagttccacatggctggggaggcctcagggaaaacttacaaccatgccagaaggggaagcaatcacatccttcttcatatggtggcagaaaggagaagtgctgagcaaagggggaaaagccccttataaaaccattggatctcatgagaactcactatcacaagaacagcaccatggggataaccgcccctgtaattcaattacctccaactgggtccctcacatgacacatggggattacaggaactacaattcagaatgagatttgggtggggacatagccaaaccatatcatttcatccctggcccctcccaaatggcacgtcttcacatttcaaaacacaataatgccttcccaacagtcactcaaagtcttaactcactctagcattaacccaggagtccaagtccaaagtctcatctgagacaaggcaagtcacttctgcctaggagccataaaatcaaaagcaagttagttactttctaggtacaatggaggtaccagcattggttaaatacacccattccagatgggagaaattggcccaaacaaaggggctccaggctccatgcatgtcaaatccaatgaggcagtaattaaatcttaaagctccaagataatctcctttgactctgtgtctcacatccaggtcacgctgatgcaaggtgggctcccacagccttgggtagctccactcctttggcgttgcagggtacagcccccttcctggctgctttcacaggctagcattgagtgtctgtggctgttccatgcacacggtggatcaagccctcttctcacagctctactaggcagtgccccagtggggactctatgtgggggctccaaccccacatttctcttctgcactgacctagtagaggttctctctgagggccccatctctgcagcaaacttctgcctggatatctagacatttccatatatcctctgaaatctaggtagaagttcccaaagctcagttcttgacttctgtgtacccacaggctcaacaccacatggaagctgccaaatcttggggcttgcaccctctgtagccatgggctgagctctatcttggctccttttagccatggctggagtggctgggatgcagggcacctagtccctaggctgcacatagcaggggggctctgggcccggcccaggaaaccattttgccttcctaggcctctggtcctatgatgggaggggctgccatgaaaacttctggcatttcctggagacaattttcccattgccttggtgattaacatttggctcctcgttacatatgcaaatttctgtagtcagattgaatttctcctcagaaaatgagtttttcttttctattgcatcttcaggctgcaaattttctgaacttttatgctctgcttcccttttaaacataatttccaattccaaaccatatctttgtggatacataaaactgaatgcttttaacagcacccaagtcaaatcttgaacactttgctgtttagaaattccttccaccagatgccctaaatcatctctctcatgttcaaaattccacagatctctcggacaggggcaaaaagccaccagtctctttgctaaagcgtagcaaaagtgacctttactacagttaccaagaagtttctcatctccctctgagaccacctcagtctggactttattgtccatatcactatcagcatttgggtcaaagccattcaacaagtctctaggaagttccaaactttcccacatcttcctgtcttctgacccctccaattctctaggaagttccagagtttcccatactttcctgtcttcttctgagtcctcccaactgtttcaacctctgcctgttacccagttccaaagttgcttccacatttttgggtttctttatagcagtatcccactctctgtggtaccaatttactgtattagtctgttctcatgctgctataaagaactacctgagactgggtaatttataaaggaacgaggtttaattgactcactggtttgcatggctggggaggcctcaggaaacttacaatcactgtggaagcagaagcaaacacatcctttgtcacatgatggcaagaaggagaagtgccgagcaaaggaggaaaagccccttatgaaaccatcagctctcatgagagctcactatcataagaacagcagcacgggagtgaccaccccccatgattcagttacctcccactggatccctcccatgacatctggggattatgggaactgcaattcaagacgggatttgggtggggacacagccaaaccctatcactgcctttaagatctatgaattgtttttctacattgaagaaatttgtagacatttgttttttattctctttttggtttgctgagagcagtagtctcttggaagtgagtttcatttacattttttcctttgggtgtcaaatatataaaatattttttaaaatcaatggctgagggataaatgagggttggtagaaagggaaaggataagggttgtagttaacggaccatgttttaatgtgtctataattagatggaagttgtctcttaccattcaacatcctggatggccttcctatagaggacattttcatcttcttttgtcgtccagagctagcatatgtgtttcatgtctttagatagtgaaaatcaattcagattttcatggaaaatgctctctcttcatcctaaagacagaattgtcacggctatttcgtttattgaaaagtgaaacctgctacagttagcatatagttaattccatatatgttacctgtatcatttaatacattcacaaagtaaaaaaccaaattttgccaagttcttgatagtaacaatagtaaaatggaatttctgttggcatattttcatgttattctgaaatgctgaatggatttattaagattgataacaatatgttgtacctttatgttctaaaatttaataacagttattcttccaaacatgccagcgtcctcaatagttgacagtctgcaaaatattctattatgcaatcagccatatctccttcttgagctttctttaagtacttgtatcctgtatttttccctgaaatctagcagtaagttgaagaaatgataaacaaaattgtatcattgtatataatggctatttataaatactgatgtacattttcataatgttatttaaatgattacttcagatatgtatttctgttttctacattttaacttctcaacatattaggttgttatcttagattggattttctaagacatagactctaagacagagatttccatgcagatggtttcttagtgagtgcttttaagaaaaatgcctgggagggagtaaaggcagcaggattgaggagagagaggagttgaatgatgatgcagtgaaatggaagatcttatctggtcccatgtggggttgggatgaccatttagagtattaccgtatgaagcaaggaaggtggaccattgtatccctaatccattagtcattagatgtgagcctcccaactaccagcttccgggcaatatcatcttggtcaaagaagtgcctgtctgctgagagaaatttcttggaagagcttaggtatgatctgttagtagataacaatcccagcaactgggagaatgaatgcttcatttgtaattggtgaatctcggtggcacaccacagtgttcgctacggtaatctttatacttattgagacatatattgtttttaagtaaaacttgtatacctagtaatgcatttaggtagtgtattggccaagctagtcctttttggaaacaatttcattgtggtataaatgatatacaataagctacacatttaaatagtacaatttgataagttttgacatatgcaaataccagtgaaactattagcacagtcaagataataaacatatccaatatcctcacaagtctgttttcggtaatcactctctcctgcccctcccttgattcccaggttaccactgatgctgactggcattatagataagtttgcgttttatagaattttataaaagtagaatcatgaagtatgtaccttatttctggtctgccttctttcactcacaaactactaactttcattttgtgaataatatgatctccgtgtgattacacacattaagaaagtcaataaaaacattgtaatttgattccgatactagtttatgggtctacattatgtatttaaagatactatcatgtttggattagcccttaggtatcaagtaaccctggagttgaggcagttactgttttatttgctatcaatctttttataagctcaccttccactaattacccaaaaatatttgatttaatacctgagtacagaaaaagaacatattcacaatgtttaaattttataatttaatattataatttacaacagtttaaaataactagtcctgaaattgagtatttctcacctaatattctgctctatttattacccactccacgaaaaaatttcccagaaaaatcacaaacatgtctcttgagtgtattattacccaacccacagaagaatttccaaaaacagtcgcaaacattctctcttgagtgcaaccattttctcgggccagccattcattgaaacaaaatagcctgtataacttctgtgggtagacatttgtaggttgttcttttgaggcattagtgctattgcatttaagataaagaaataacgaattcacaaattttataaagttctcttaaatttaccaagtcaatagcaccaccactttgattcctataacctgtgacttagttaggcttctcaattccaagaacataccaccattatttcttataatgtcctcagattaaaacatgtgttgtcctttctttatacctccctgcactttaattgaatattttgccatttactggattctgtacactttttatgttttcatgccctcccttttcattctcctggacatcaatcgcaagtcagtagataccttgtaagagatctctctccacccaaatcactgtttcttttgaaagagttaacctttctgaagcagcactcctgcttcacatttcccagcacaggaaccttcagtgtttctctgttgatagctttgatttcaaacgggtagccccaggagaaaagagagctgaaggatatgttttgcttggctgctttgtttgacctgcaaggaacattaaaaggcaatgaaaccgggcagagactggactgatcaacaccatcagtttagcacttattgctatactttctaaggctttacaattttatgtgtcccacgtgtcccctgaaggcatttgattttctaacctcctaggccagaggctaacatccagaattcatagtctggcacttataaaccctaacttagcttctgtcacttgtatctctatgcaactctacagcaaaatgtacttattttctctaaaatacccttattccatacttctttggagtgtaattttatatataaaagtcctcaccacctgtaaacattaggaagctttgattcgaagaagcagaagccatctccatttaactgaagtgaaatgaaacttactggagggataatgtatagttcttggaaatgaaggaaaagaaggcaactgtggcagagggagggcagcactgagagtcaggaactccagggaagttactttttggatgctgtcattaaaatgcttcagcttcaaattgtactgactctacctttctcaattctagattcaaatttctaaatgtaattggcataaattaggaacttgtcccaccagtttatagagtttacagagcactatgattataggtccccctaagatcatgcagaatgagggaagagtaatttcatccaaggaaaagcagggtaccattcaccaaagagtggagatacttattcagaacaattaatgttagatgccacaaaaaaactaaccctgaaatcaaagtggcctaatgaatgcttatttattgctcatataaagtctgatataaatcaggtagcattccttcacagtgactcagggacctaaattgctttcatcttgtggctctgccatgtcaacattgaaacttcagaggtattgacaaaggagagctgagaaattgacactaactatcaagtacctcaggcaagaagtgatgcatcacttcctacactttcccactttccaggattcaatcacaattgcactcacgaaacctcaagggaacatgagaaacataatgaaatcaataccaagatatccaaagagtactaattttcttcaccacagaagggatattggacagacaaaaaattttgggacagaggaatatccactaaatgatccttccatgccctgctcagatgctacattttccattaaggctctcttgaccaacccataaggagatgatctccaactcctctgaacatctggaacattgcattctacttatttttactgtctcctattgtaataattgttggctattccttattagacaaattataagcttttatgggacggtgatcaaaagtcctaatttatcttgtcttcctacagcattcaaagcattgtagaccttcaatacatagcagtcttcgaagccagagtattagtattttttctaaaactgtattcatcgcaacgaactcgatggatgttcaataaaaatgtattgaatagtcattcatgcagatagcaaatttcttaaaacatttcttactcaatgtttacttatattcatcatgaatataaatttaatataataatatcaaatcccattacatttagtacaaagtaaatataccaataattttatatatgtttaagtgaatttttatatttcatattatttgtgaatgatacacatcgtcgtggaaaatttacaacgttgaagtaaattatacaatatagggtatttgtattaaaatacatttcatagaaggtgctttaaatttaaaaagttagcatgaatacatattaaatgtaaaagagtctttaaaatgaaaaatatttcacacttgtgggtttgatctaaaaatatcagtcgctatatgatatggctagacagatttgagtaggtataattttaatgaataatattgtgtgatattttagggtccaaaattgaatgtttctattaagtaacagatatttaaatgccaagcagaagctacactggcaaaacaagatttagtatgttatcttaagtgtatcctaaatcctctttcatcttatggagaagaaatacatgcttttagtttccagccactcctgtctatattcatttaaaataaactattatttatatcagatatgatgccatgtgagtccacaatttgtagtatagagaaataatttcattgaattattttggctgtttgtacctgagacctgattctgaatcatttatttttctatttaagttgtgctattttatgatcctacctatggctatgttcaaaacaatgacaaaatatattttaccctgatctttttttcattattatactttaagttctgggacacacgtgcagaacgggcaggtttgttgcataggtgtacacgttccatggtggtttgctgcacacatcaacccatcatctacattaggtatttctcctaatgctatccctcccctaaccccccatcccctgagaggccccggtgtgtgatgttccccgccctgtgtctatgtgttctcatcgttcaactcccacttatgggtgagaatatgtggtgtttggttttctgttcctgtgttagtttgctgagaatgatggtttccagcttcatccatgtccgtgcaaaggacatgaactcattcttttttatggctgcatagtattccatggtgtatatgtgccaattttctttatccagtctatcattgatgggcatttgggttggttccaagtctttgctattgtaaatagtgctgcaataaacatacgtgtgcatgtgtctttataggagaatgatttataatactttgggtatatatgcagtaatgggattgctgggtcaaatggtatttctggttctgtatccttgaggaatcgccacactgtcttccacaatggttgaactagtttacagtcccaccaacagtgtaaaagcgttcctttttctccacatcctctccagcatctgttgttgcctgacttttgaatgttcgccattctaactggtgtgagatggtatctcattgtggttttgatttgcattcctctaatgaccagtgataatgagctttttttgatatgtttgctggctgcataaatgtcttgttttgagaagtgtctgttcatatccttagcccactttctgatgggtttttttttttcttgtaaatttgtttaagttccttatagattccgggtattagccctttgtcagatgtatagattgcaaaaattttctcccaatctgtagtttgcctgttcactctcatgatagtttcttttgcagtgtagaagctctttagtttcattagatcccatttgtcaattttggcttttgttgctgttgcttttggtgttttagtcatgcagtctttccccgtacttgtgtcctgaatggtattgcctaggttttcttctagggttttgatggttttcggttttaggtttaagtctttaatgcatcttgagttgatttttgtataaggggtaaggaaggggtccagtttccgttttctgcatatgactagccagttttcccaacaccatttattaaatagggaatcctttccccgttgcttgtttttgtcaggtttgtcaaagatcagatggttgtagatgtgtggcattatttttctggcctctgttctgttccattggtctatatatctgttttgctaccagtaccagtctgttttgcttactgtagccttgtagtatagtttgaagtcaggtagcatgatgcctccagctttgttcattttacttaggattgtcttggctatacaagctcttttttggttccatctgaaatgtaaagtaatttttcctaattctgtaaagaaagtcagtggtagcctgttggggatagcattgaatctgtaaattaatttggacagtatggccattttcactccactgattcttcctaaccacgagcatgaaatgttttttccatttgtttgcgtcctttcgtattttcttgaacagtggtttgtagttctccttgaagaggtccttcacatcccttgtaagttgtattcctaggcactttattctctttgtagcaattgtgaataggagttcacccacgatttggctctctgtttgtctattcttggtgtataggaatgcttgtgatcttttcactttgattttgtattctgagacttggctgaagttgctcgtaatgttaggggcagccagagagaaaggctgggttacccacaaagggaagcccatcagactaacagtggatcactctgcagaaaccctacaagctagaagagagtgggtgccaatattcaacactcttcaataagggaattttcaacccagaatttcatatccagccaaactaagtttcataagcaaaggagaaataaaatcctttacagacaagcaaatgctgagtgattttgtcaccaccaggcctggcttacaagagctcctgaaggaatcactaaacatggaaaggaaaaaccggtaccagccactgagagaaacataccaaattgtaaagaccatcgaccctatgaagaaactgcctcaactaacaggcaaaataactaaccaacatcataattacaggatcacattcacacatgacaatattaactttaaatgtaaatgggctaaatgccccaattaaaagacacagactggcaaattggataaagagtcaggaccatcagtgtggtgtattcaggagacccatctcacatgcaaacacacacataggctcaaagcaaagggatggcggaatattttccaagcaaatggaaagcaaaaaaataaaaaattaaaaaaaataaaaaaaaaaacaggggttacaatcctagtctctgataaaacagactttaaaccaacaaagatcaagaaagacaaagaagggtattacattacataatggtaaagggagcaacgcaacaagaagaactaactattctaaatatatatgcacccaatacaggagcacccagattcgtaaagcaagttcctagagacctacaaagagacttacactcctacacagtaatagtgagagacttttatactccactgtcaatattagattaacgagacagaaaattaccctgatctttaacattccaggcaagtatgttttcagtcatacatagtacgtgaatctgttatattttaaatccaagcttttggaggacaaatgatttcacagttatacaactcagcctctcccagactcaagtctctcacttgatgcagtattcccaccccatcttcaataaaagaagaaagcatgaaacatcgcattgatatagggaaagtatatctgagttttctatatagcatataaagaagtaaaataactctgtgatttgtgatgagatagatttagctgcaacaatgaggtctggatattaatattggattaacttcctttgagattgcaacttccatgtggcattcagcactttccttgttttctcatatgtaggccgagaataaaattatcctgtttctatttcccaacatgaaaggtcttttaactgtttgaagacatatgtttcatgtgaaaccaaggaattgctactgcaattttgtaagacagaagttagcaaacttattctgtaaggaacaagatagtaaatattataggctttgcgggccatatggtctatctcacaactattaaactctgccatttttttttttttttgcaaaagcaaccatagacaatatgtaaatgaatgagtgtgattatattccaataaaactttatttttaaactacaagactagttcttaaaataaaatttaacaaagaactattatatgatccaataattccacttctgggtatatacccaaaataattgaaaacaggtattcacacagatatttgtacacccaagttcatagcagcatattttactgtagagaaaaggtagaaacaaatgtacactgtgtacactgaccaagaatggagaaacaaaacgtggtgtatccatacagcagaacagtattctgctttaaaaaggaatgaaattctgtcacatcctaaaatagggatgaactttggagatattccacctagagtagttaaattcttagacaaatagttgcatggttgccagggaccagggaggggtaggggaaatgagcagttcttgtgtcattggtatagagtttcagtttagaaagatgaagagttttggagatagatggtggtgatgtttacatatccatgtgaatgtatctaatgccactgaactgtatacacttacaatggttgaaatattttgtatattttcccacagttaaaaaagacaagcccatgtgcccaaattgctgatataaatctgtattcctattagtgagcagtaatgagccatgtttagtgcagctgatatggttaagatggaacaattgcatgtaatgcaatggtgggtaacatctaataaaaattggtactcaccaatttccatttccattgtggatataaacacccttcacattatgaatcatgttatttgttatttgtgtacttacttattaaatcacttttctccatctctctcacctctatgactctgtacatgtacaaacaacatacacactgtgaacttctttagaatgacagttacattttcgttacttgattcattgtttggccaagtagatacccagtaagcataactagcaagtgaataatgtatatgtgatcattttccttttcaaaaaccacttcttatctctaccacaccaccacacattattatatgctacacttcttatataaaacaaaaaagaataggccaggtgtggtggctctcgcctgtaatcccagcaatttgagaggccgaggtgggcagatcacttgaggccaggagttagagtccagcccagccaacatggtgaaaccccatctctgctaaaaatacaaaaattggccaggcgtgttggcgcatgcttgtaatcccagctacttgggaggctgaggcaggagaatcactggaacccaggaggcggaggttgcagtgagctaagatcatgccactgccctccagcctgggcaacagagcaagactctgtctcaaaaacaaacaaagaataaataagctttaataaactcttttgcagaagagttttcatttttaaacatagaggaaaaagaagatgaggatgaacgatagtgatgcccagaagagaaaattgtgtaagacaaaatcaattgaccaggcgtggtggctcacgcctgtaatcgcagcactttgggaggctgagacgggcagattatgaggtcaggagttcgaaaacagcctagccaatatggtgaaaccctgtctctactaaaaatacaaaaattagccgggcttggtggtgcacgcctatagtcccagctacttgggaggctgaggcagaagaatctcctgaacccagcaggcggaggttgcagtgagccaagatcacgccactgcactccagcctgggtgacagagcgagactacatctcaaaaaaaaaaaaaaaagattaaatcaattttagattgatatagagataaataattccctaagtacaattaaagcaaggatcagaccctgatgagtaaggatgatctaacaaagggctgacaatataaagtgaatgcgattgtcaccaaataaacatctcccaagagctttgggacaatcttcagctaagcatattctgcactttacatcgttctgccatatgccctatgtagcttttcatcctccagaaatttgaatagcacacagtattttttggcaccgagtaattgtggaacttaaacttcctacaaagagagaagctgtttcagtcagctaagtgaccagttagtaagcaacttctattctcttagtgtcgatagggttaaagacagtcataagctccccaaacccttggccgcctcaattttttcatttaaatacttatcttcttatcttcatctattttttagagtcacacataaactctgtctatgaggttcttaaagacctggacaatatatttaatctctgtatccttaaatctcaccatgatatctcaaagatggtagataaaactgttttccctcacttctctgactccataccaatacttaatcgatcgggaaagttttataaaccatttaccgttgaatataaatatatatacacacacaaacatatatatatttatatatatttatgtatatatatatttatatatctatatatatttatgtatatatttatatatatttatatatatttttatatatttatatatttatatatatttatatatttatatatatttatatatatttatatacttatatatatttatatatatatttatatatatttatatatatttatatatatttatatatttatatatatttatatatatatttatatatttatatatatttatatatttatatatatttatatatatatttatatatttatatatatatatttatatatttgtatttatatatatttatatatacacatatttatatatttatttatatatgtttatatatatatatatatggcactatatatcagtgagcaaaggcatcataatctttatttttatttctgtattcatttattcaacatatagtaattctgatcctgtctcaaaaactctacagaaattaacaaagaacacattgtttctgcctttttggagctgaatgtttagtgggggaaaatgtattttaaggcaataatcatatacatgagtgtatatttacaagccgcagtaggtgctatgaatgaaaagtataaggagctatgagatattctaacaaaaagaaatgctgcagtctagagactgagagtaattatctgtgaggaaaagtattgaagcagagacctgcaactcagtaaagagtgtagggagtcacatgaacaaagtcttgagatgttggtagagatcttggaatgttcgaaattctaaaagaaagcccttgtgtatggggtatggtgagagagggagagcgtggcaagttttacgttgtacaagtcattgtaggccacaaaaataagtatagattttatctaagtgcaacggaaaaccattacaagtttattttttgattcttaaattttgttttacttatttatttatttcaagacacaatctcactctgttgcccaggctggagtgcagtgacatgatcacggctcactgcagccttgaactccttgggctcaagcaatcctcccatatcaccctcctacctcagcttcctgggtagctgggactactacaggcatttgccactatgcctggctaactttaaacaattattttgaagagacagggtcttgttacgtttctaagtttctaaggctgatcttggattactgggcccaagcaatcctcccgcctcatcctcttaaaatggtgggattacagatatgagccacctcacccagcaaggtagtgacataatcattgtttttgctgaaaacaatgtactttagggaacctccctgaaaacagaatggccacttagaataccaaagcatagaccaagccttgagatggcaatggaagtggaaataaacatgtctttgatacttatgttaatggagctattagtagcaacttttgacagatttgaaagtggagttgaaagacagtgaagtgtcagggatgatccctgagcatattagataatattgagctggagaacagaaaagaaggggcagatttggaggtggagacctttctagatttatattcaatttgagatacatctgaaacatctacatgaaacgtggatgaaatatctgtgaccaagatacatacgtgggatacctaggcatgtaaataatatttaaagttatgtgagtgggtgcaataacctaaagagagactgtaggtagaagattgatcaggacaaatctttgaggaacttttttttttaattattattatactttacgttctgggatacaggtgcagaacgtgcaggtttgttacataggtatacacgtgctatggtggtttgctgcacccatcaacccgtcatctacattaggtatttctcctaatgctatccctaccctagccccccacccccaacaggcaccagtgtgtgttgttcccctccctgtgtccatgtgttctcactgttccactcccacttacgagtgagtccatgcagtgtttcattttctgttcctgtgttagtttgctaagaatgatggtttccagcttcatccatgtccctgcaaaggacatgaagtcatcctgttttatgaggtacttttaatgcatttagtgactgggtaaggaataaccctgaaaaggagcacaaaaaccatcgaggtatgaagaaagccaggagatgtagtttcacaaagcagccagtggacagtaatggacaccagcataagcttaagacagcagtgatagtgttcatcagtgctgaaaactcattggaagtggctgaccatatgttgattgcgaatgcaatgccttctcccatctcctattgcttttcactgtttccgtcatgtccagagtgaaaacactggggaggcagaactgtgtaccaagaaaaatgttttgtgtcagaggaaacaagagctcattaatttccttttgacccgcatggataggaatacgataagcaggagaaaaataaaacctgctaaactaggcaaataaagcttaatagaaaagagagaaaatattgcttacaaagggaagaagacatttgccacaatattagctaaaaagagagtgaggaaaatccacatttaccatttttattatgtgtttccaaagtcgacattaagtgaatattatcactttgaagacagagaatagattgtaagcagaagaggaagtgggattttttaaatggcatatatttaaatgttgaaaaacccatttccaatactcccactgagatatatgcaataaaaacactccgcaatcagtaatatacatgtgaagctcctaaaaatcctccattgagaagattctataaaactataaagtattattatttctgctatcagaaaataaacacatactttctaagaacaagatgaagaccttaattcatcttcccaggaatatacttgtgtacttaatggttcaaggcgtttgtgatgcaaaaaaagtgggacattatgtacaaaatagttttaatcagaaaatgaaggaagtttggtatggtatggttctagggttgcaagttttcctgcaaaaagggagtacttatggctaggtgatgcagccaaggaagcatctctgaggacaggttatcctggctcctattccaaaatatttaggtctccttgagtgttcgatccttgaaccaaggacaagaatagaaagaaataaaagccacttgtataaaggttgccttcattttgtgtcgaatattgacaggagaaagccagatttgtagcttttccagggataagtgagtctcagacacagttaagagcttggctttggaattagattgacctgagtttgaatcgtggctccatcaatctctgattgtgtgaatttttggcaagttttagctgaacctcaattttctcataagtaaaataggcataatacagctatgattctgacccttgccattagcactctgagctacttgtcagtgtatcctggtctcttcctcaagcacttttccactttgttatttcaagattctttgaaattatgaacagtagctcttgatcaccaaacaaatgggagaccatagattcaaaggaacattttagtaggatatttgataagctttgtatttttttgtgctttgaaaattagagtagatttagatttaaggaactataaagctatatgtttacaaaactttattcagttgggcagttctgactcagtaactgaaataaaattgatgaaaacaaaacatatgttttactgttgtgttcacatttaaagattatttaatgcataaccaaaataggttcagcaaatgtttatacatacatgtacttagatatttgtaattcttatggtagagcatgggaatgaatgagaattctcctaggctggaataaaactaatgtctaactaagaattggcctttcacttcacgaatatatatcattatatataaaagattcatcctttgttaacttatttgtttagcttagtactttctaagtacttttctatcctgtcttggtccctatataagaatgatactattataaaaatgaacatcctattatttcataatgattagcatatcagcatatttaagagcaatgcctatatctttaccttcattattattttcatgtttaaaatcctgataattctagaaaaacaaggttgtaattatccattcataataaaagtcacaccaagttattcttgataattaacttggcatagtggagtgcactgagcaattaataattaattacgtggttactagctcaaattttattgagaaccaaggagttaaaattaatagtattgtgtttgcaatgagttaattactttgtttctttgtttttttttttggaatagtgccataattagtatcctaatagaaacagaatataaagtgggtttctgagtgcttgcttgtcgaggtgtgtaacaacatatattttaattataatttgagtcactaattgttgtcaaatacaattttaatttcttagttcagagattaaaagatatgtaaacagctccaaaaaagaatatgataagatggtttatacaagtaaataaataactatatgacttcagaagttttatttaacaacagttgtataagtgttttaactaatgttaacaatgccttttttgtaaatctcctctaccacaaatatgagataaatttaagaacggcattttcattaaatattgattattaaaattcatatataagtattggctgtacctgagcatttacagtgaaaccatgaaggactggcaggtttggggctgtttgataatatccttccttaatctttcttcgtagcatcattgtttaattttggctgaccacaatcacttatgaaaagaaacagctcaaataattagtataacctctttctcttcataaaaccttcaaatcaatgtggtcataattatgaaagtgtaagattataaaatcttctcatttaaatatacatcttcatattagcagacttggctaatttcttcatttatccttgacatccacacttaaactctgtcaaactggtcattcatagactcattattcattcaacaaagattagtgtgaccctactatgattctgagggctagaaatataaaactgaataacatataaaccctgatttctgtatttatatatacagaaaggaattatgaactcacagttttaatgcacagtgacgagtcctcagttcatgtctgccttgggagctaggcatataccaaagcaggactgtctaacacagtttgggggtctcagtctggaaggatccgggtgagatgatccttgaattgagttctaaaaaatgaggagaaattatccagataatggaaagtttaggagaaattaaccagataatggaaagtttaggaaagaaacactatttatatgtcaaggacaaagtttgaccaaatgtgtctctgaatctaactggctttatgtaagataaaattaaaaaataattgtcactaaggtttttcacatctgcagcaactaccatcatatctggctcaatatttaaaagaaatacttaacgatttttggcatttattgctactataatagattgtgctatttaaagagaaattctagatacatgccaaagtattttcaggtgaagtaatgtgattcgtgggttttgttttgacaaacttccaaggaaattatttttaatataaagagcaatggaggaagattaaacaagattcgcaaatgttgataattgctcaaggtggtgacaggtgcatgggggtccataatatactgttctctttacttatatatgtctttgaagattttcatgatgtaaaattttaaaatcagaattacagtaatacctctttctttgacaatcgttttcaaacttggttcaacaactgaatttaaattacctacatggctataaaaataaattagatatcctggttatttggtctggggtgggtcctggccatatctgtagggtgtgtgggtgtgtgtgcatttagcttcacatttgactctgaagtacgtggaaaaccaattctgggctctacatatgcaattccaatgcctgacattaggtggtgctggttgtgagccatgatttcaggtttgacttgtagagttaacagaagtgatatcaccaccgatcccacagaaatacaaactaccgtcagagaatactacaaacacctctacacaaataaactagaaaatctagaagaaatggatacattcctcgacacatacactctcccaagactaaaccaggaagaagttgaatctctgaatagaccaataacaggagctgaaattgtggcaataatcaatagcttaccaaccaaaaagagtccaggaccagatggattcacagccgaattctaccagaggtacaaggaggaactggtaccattccttctgaaactattccaatcaatagaaaaagagggaatcctccctaactcattttatgaggccagcatcattctgataccaaagccgggcagagacacaaccaaaaaagagaattttagaccaatatccttgatgaacattgatgcaaaaatcctcaataaaatactggcataccgaatccagcagcacatcaaaaagcttatccaccatgatcaagtgggcttcatccttgggatgcaaggctggttcaatatacgcaaatcaataaatgtaatccagcatataaacagagccaaagacaaaaaccacatgattatctcaatagatgcagaaaaagcctttgacaaaattcaacaacccttcatgctaaaaactctcaataaattaggtattgatgggacatatctcaaaataataagagctatctatgacaaacccacagccaatatcatactgaatgggcaaaaactggaagcattccctttgaaaactggcacaagacagggatgccctctctcaccgctcctattcaacatagtgttggaagttctggccagggcaatcaggcaggagaaggaaataaaaggtattcagttaggaaaagaggaagtcaaattgtccctgtttgcagacgacatgattgtttatctagaaaaccccatcgtctcagcccaaaatctccttaagctgataagcaacttcagcaaagtctcaggatacaaaatcaatgtacagaaatcacaagcattcttatacaccaacaacagacaaacagagagccaaatcatgagtgaactcccattcacaattgcttcaaagagaataaaatacctaggaatccaacttacaagggatgtgaaggacctcttcaaggagaactacaaaccactgctcaaggaaataaaagaggatacaaacaaatggaagaacattccatgctcatgggtaggaagaatcaatatcgtgaaaatggccatactgcccaaggtgatttacagattcaatgccatccccatcaagctaccaatgcctttcttcacagaattggaaaaaactactttaaagttcatatggaaccaaaaaagagcccgcatcgccaagtcaatcctaagccaaaagaacaaagctggaggcatcacactagctgacttcaaactatactacaaggctacagtaaccaaaacagcatggtactggtaccaaaacagagatatagatcaatggaacagaacagagccctcagaaataacgccacatacctacaactatctgatctttgacaaacctgaggaaaacaagcaatggggaaaggattccctatttaataaatggtgctgggaagactggctagccatatgtagaaagctgaaactggatcccttccttacaccttatacaaaaatcaattcaagatggattaaagatttaaacattagacctaaaaccataaaaaccctagaagaaaacctaggcattaccattcaggacataggcatgggcaaggacttcatgtccaaaacaccaaaagcaatggcaacaaaagccaaaattgacaaatgggatctaattaaactaaagagcttctgcacagcaaaagaaactaccatcagagtgaacagggaacctacaacatgggagaaaattttcgcaacctactcatctgacaaagggctaatatccagaatctacaatgaactcaaacaaatttacaagaaaaaaacaaacaaccccatcaaaaagtgagcgaaggacatgaacagacacttctcaaaagaagacatttatgcagccaaaaaacacatgaaaaaatcctcaccatcactggccatcagagtaatgcaaatcaaaaccactatgagatatcatctcacaccagttagaatggcaatcattcaaaagtcaggaaacaacaggtgctggagaggatgtggagaaataggaacacttttacactgttggtgggactgtaaactagttcaaccattgtggaagtcagtgtggcgattcctcagggatctagaactagaaataccatttgacccagccatcccattactgggtatatacccaaaggactataaatcatgctgctataaagacacatgcacacgtatgtttattgcagcactattcacaataacaaagacttggaaccaacccaaatgtccaacaatgatagactggattaagaaaatgtggcacatatacaccatggaatactatgcagccagaaaaaatgatgagttcatgtcctttgtagggacatggatgaaactggaaaccgtcattctcagtaaactatcgcaagaacaaaaaaccaaacactgcatattctcactcataggtggggtgggaattgaacaatgagatcacatggacacaggaaggggaatatcacactctggggactgtggtggggtggggggaggggggagggatagcattgggagatatacctaatgctagatgacgagttagtgggtgcagcgcaccagcatggcacatgtatacatatgtaactaacctacacaatgtgcacatgtaccctaaaacttaaagtataataaaaaaaaaaaagttcgttcctcttgttagaattttcatacaaatgcaagactccttattttcaaagagaaaacaaaattttatataaactaatacctgagaagaataggaaaaattaatgatgtatgggataggtactgataagaacctcttcttttgtgtacattgtgataaactaatgtttaacttgagtcgatgtgctggaaatacttgttaaattttcaagaattttgagatctgttaaacacaaccattatcaaaaattaaattatggtaacttacattaaatgaaatatattgttcacaaatgtactagatgcacaaaagtcatcactacctaattcttttattatatttcactattatctacgggtttgttacctgtataatggaatgactgtataatggtgtagtgctaacttcatgtttggtgacattataatgatagcttaaaattaaacatactgggaatattcaaatatgtccttcctctcaggggatctgattgttagacatttaccagcatagcactgtcttaattaacatcatataattgtcttttatccttaagatgttgagccagtaaatatcacaggagagtttgttccttaggttttaatacttgctttaccagtttactgtagcatcatgtgaaaccagcttctagaccagctgtctttaattggtatgtacccaagctaatccttgtcaggctatcatcaacccaagcacttttgaagttatttttattattacgctacagaaagattttatggcctttttgctcttttctttaccctagccctaggatcatataatttcatctcctatttattcctatttatttccttatctaaaatcttacttaactagcttgcttgcctgcctgtctgcctgtctgcctgcttgcttggtttttctttttttctttcttttctttacttctgctttcctttcctttcttttgtttcttccttccttccttccttcttcctttcctttccttctgttccttttccttttccttttcctttgcgttcctttgctttccttgctttcttcgcttgctttcttttcagtaccacaaaaaaactaacaataacaaaaatattgctacaaaaattgtgacctcccaattctatcctcatttcacggacccataaaatgattatatatctatgccaatgcgttctaactacatgatattattattgatgataagagaatccaaccctcaagaaatgaagtattataatgttttagaacacacagaagcatttttaaccaaaatgttccatgtgattttatagggtgcatgttttaccttttcttatttggaaaagtagcaaaagtattaacaaataaaataagttacatactctttgtatataaatctttcgtgtacataataatgccatttcccttctagtgcttccattattgaaaaaaaatagacatatagcaacgtgctagacattgaagttaactgttaaaaagtcatcagagggtaatgttaaaggtggtatttcaggtaataaagcatatgcagaatgattctattggctttatttccaacatgagtgttattagtaccaaggacactgaagtttaaaggaggggagtgatgagactgatcattactttgtcttctgtaacaggacttaggtggcccagagtgatccttgttggttgattggttagttgaacttctatttttgttactaggcctgcagatctgtggaatctccagagtgctgtgtaatgttacataggccacacaccagacactgttccctgaaggactgaaggtggaattggaacaatatgtagacagttcttgttgcagttaccaaggaaatttggttaggattcaggcctccatgtcagaaaaggaagtctattttatgtgctagaaaaataaccctaatcatcttatcttgggtctctctggggagcatgatgatctacctggtcttgtaaactgtatagaaccggctgggttgagacacatatgtctcataacagagcttccacttaaggctataaaatagtggtccctctattgggtatatgccttatggaaaaatatacgttatgctggtacctattataaaaaccaatgcaaaatgattagagatttctaatccaagtgttatcctcatctgctcccaaaatacagcaatgaaaaaatagaaaataaaaaaggatatatttacagaactgtatttacagaaatatatgttgatgacaagataatcaaatacatatcaaatcatgatgtgtatttacagaaatatatttacagaaatgtaaagcagagaatggggcggaagtccctgacagacttgacactgaaccacaaaacaacagtggaagccaggaatttggatgctgcgggatagttgggattaaaattgcttcaagcaaggtgtggaactggagacaaactcagtattcaaaaccagaggctgggctgtggtgcttgcattcgtgaaagaaaacctggggaaaaagtgcttcttcaggctgtagcctgacgctatggcttgcctaaacttatgggcctatgtaggtgtaagaataaagacatagccttgctgctgggaactgtgttgcatctgttctcttgcttgatgaatggattgaaattatccccagtaacattgcagtgcaagaactttaaaccttaaaggggtggctggagaccacgggacgcgatgcacatgcaactactaaatgctagatgaggatacctgaggagagagaacaagacacaaacgtgaacatggacctccaatagaaatgacaatcgaaaacatacatttatcttctctctctcccaaattgttcaaagattacgctaagggaataaaaacaatacagtcataaaatgacaaataaaatggaagaagagacatctgcacagacatatcaagtcaatgagatgaaaattaggacaagtaagccaatttgtttttcaggatcccagaaaaacttgtggattgaagacgctaggtgttttagaaggccatatattcccgagaggggctggaaataaaggggttgttttgaatcccttaaaaggggcaattacatttcatgtccccagctcagggtagttaattagacactactcctctctcatcccagcagacgtgagtgagtggtttgctttctggtgaggctgaaacaacttttggcatttggacaacaggattagttgatggaagagagagccaccatactgaaaatacaggattaagttaaagtcaacatatttaatggtgagaccagcagtccctcttcaccttcttggctcttaagtttctatcctctgggcagtagattataaatttattctcctgagagcctacctgcaatacgaaaactatttttagtcaagttttattgctataacaaaataccatagactggatgccttataaacaacagacctttatttctcaccgttctggaggctgggaagttcaagatcaaggcactggcaggtttggtgtctggtgaaagctcatttcctgtcttctcactgtaacctcacaaggcagcaggtccaagggaactgtcttgggcctcttttgtaagggtactattctcattctggatggctttggccttatgacctaattaccttccaaaggccccacttcctaatgtcatcaccttgagggtgaggatttcaacgtataaattttgcaagaacacactcagatcatagtaacctacaattaatgatatgtaatgatccaccagtgaaatagccagatctgtgcctaatgaccatatattgaagcccaccaagtataagccctacatacgcacaaggaatttccaaaagcatttaatgcctcagttttaagagacaatcaaggatttccagatatttgaacatgtctcaaagatggaagacagaaaccaacataaaaacaaaaagcagaaatattgggaaaaaaacaatagccacataaatgaaacagaaatctctgcagaaagagagacaaggcatagaccttaagaaaactttttaaagatagctataaaattattatctcacagtgagactagtcactgtattcataagaaagaacaagagactatagaaggtggtatttccgagaaagataagggttatttaaattaatagtatagcaggttaagtttttaaattcttaattgtataaatttatgggttaccagtgtaattttgttatatgaatatattttatagtggtgaaggcagagcttttagtatatccaccactggaataacatacatggtatgcatagcagttttagagcaatgaaactactctgtgtgatactataatggtggatacctttcattatatatttgtccaaacccatagaagatacaacatcacaagcaaactctaatgtaaactatggacttcgagtgttaatgatatatcaatgtatgtaagtcagttataacaaatgtaccactctggtgtgggatgttgatagcggggtaggctgtgtgtaatgaggaagggggccagagagtatacgggaaatctctgtactttcccctcgattttgctataaatgtaaaattgctttaaaaaatcaagtctattaaaaatgaagagcagaaataaaagttcaaaagtagaagataaatttgaagaaatatctcataaagcagtataaatagccaaaagcatggaaaatgggagagtataagaatcttagaagatcattctaggtaagtgtttcacaaatagaggtgattttgtcctgcagaggacgtttgacaatgtacggagacctttttcgttgtcacaaataaggaaaggatgtactactggcctcttgtgaagagtgacgcaagaggaatgcaccatgcagccatccacaaccaagaattactcatttcaaagtgtcaatagtgtttatgtttagaaaccttgttctatgtaatccaacattcaaataatagatgttaaaaataaaacagaagagaggcaactgtggagagaaaattatcaaagaagtgacaacatcagttttcttagaactgaagaaaatgagtgtccaggtttaaagggcttactaaatgcccagcacagcaaatgagctaaaaatctacaccaaggctcatcatcataaatttttacaaaaacaaggacaaagagaagttcacagatcagaaatcagaatggctttggacttttcagcaatagccatggaaaatagcagaaaggaacacttcctttaaacttctaggaataattaactttggctttgatttcatatcctatatgaaattatgttcacaaattctgtgatgctcttctattcaagagttacagctaaatgtccctgtcattgagtgtggactagattcagtgactcttttgtgatgatatgtcatttccaagtgtaggttgtagaaagactgtggtttatgtcttgtgttctccatccacgcctatctctctctgtgtctctctttctctctctctctctctctctctctctctcatgcattgcttcttctgtgggaacacatgtcatgagcagccctatggagatgcacgtatgctgagaaactaaggcctcctgcaaagagccacaagaatgagcttagaagtgcatcatttaacaccagacaaatctcgagaggctgcaagcatagacaacagcttaactacaacctcataaaataagctatgccagtcccaccctgctaagccactctcagattcttgaccttcagaaactgccaaataataaacatttttgtttttaagctgctaaattttggaatgacttgttattcaacaatatataaattgtacaccctgataaactataaattgtgcggagaaaataattttcagagatagccttatgtactcccctaaaccttttttccccagaaatctattttcaaaaatatactctaccaagtgaagaaagaaaccaagaaagacaaagaatgtttagttgtgattggagatcagaaggagagtgttttaggcatgattcgccttgttatgctgcaataataagcaattccaaaatattagtggctagaaacacaaaggttgattttgtatctttgcaacatatccaacacaagtcagtcaagggttctgatcattgtagtcactcaggaatctaagctgattcagtctctagtattctatcattctaccgtaacaataagaagctttagcgttcaccatgtcagtcaaaaatgcgtggaaaattttaaactgactcttacatgcctctatgtaggagtgatatatgtcattttcatttcacttcatcatccaaaggaagtcacgtggtcatgcctaactctgaggggacaggggattataatcactaatatttttaagagaggtaagagaattaggaaaatattggagcattagtattacctgcaaagcctaggatccggaaaacagagaacccaacgtgggaggaagatgcaaagtggtgccagaaagatggtggaggagatcctgtaacaacagctgtataacagttgtagagagaaacctgtacagattggagaagaaaatagtgctccaggaattttgttaccaagaaaaaaaaaatctaatgtattcgaatgtattgagaggtggtattcttattgtgtaagagtataatatatgacatgtatgacagacagaagtaccatttaaaattttattaaacataagaattagatccctatctcacactgtacataaacataaaaatggtaaattgatggattgcctaaacatgaaaggcaaagcattaaaatatataaaaatattttggggcatgtagggcaaaagaggtgtcccttaagcaacagcacaaagcaaaaattgtaaagaaaaagacatatatttgatcattttaattaaaaacctgtacaatgcaaagacttcataaacaaagaaaagacataggctcagatagtatatttgcaatactaaaacaataaaggatttatgtcataatttaagaaaaatatttacctatcaatagaacaaaataaaaataacctaacaggaaaatatttttaaagtttaaaaaataatagacagttcacagaacatctgtatgtcaaatacacttatgaatagatgctaactctcatttattattggaaaaattacttcatattagtcggttttcatgctgctgataaagacatacatgagactgggtcatttatacaggaaaaaggatttaatggacttacagttccacacagctggggaggcctcacaatcttggcagaaggcaaggaggagcaagtcacatcttacatgaatggcagaaggcaaagaaagtcccctttataaaaccatcagatctcatgagactaatttactatcacgagaacagcatgggaaggacctgcccccatgattcaattacctcccacgaggtccttcccacaacatgtaggaattcaagatgagatttgggtggggacactgccaaaccatatcgtactaagtgagataacgtactcccatcggactggaacaagtaaaaaataaaataagattgtgaaaggtcacaaactctcattcttgtagaaatttaagttggtacaaccaatttagagtgtaatttagcaataatctagttaaactgaggatggcatgtcctaccaaacagcattccagttaatcacattgaagatagcatgattgttctcaggcttccatattttctgttgaacggtaagttgtcagtctaattggcattcctttaaaatagacttgtttcctcttgatgattttcacattgtaattttgtctgattttcagcacttcaccggtctttaaatgattatgtaagattttcattgctgaggaggaaatcctatcacctcaaatactatcttattagttatattttcattttattttaccatgattttaaatgaattccttaaaaaattaggttagagaactaataaatgataaagagaaaaattattcttcatcctgatagctgttatgtgagggtggaatggtatggctggtttttttcactgtcattttgtaacttggaaattcttattttttaatacaatgacaatattttcatagttaaaaaacactaaaactaaaacaatagtctgttaatgacaaatttaagggcgatttcattaagttaaaaatccatgttaaggcattataagatgaataaatactccaaatgaaaacaaagtgaaggccacttttatttaccttttgtacatgatacttatttttcaacagttgtcatgttagaaaaagttgaaaaaataaaacaagatacacccccttttggcctctaaccttccaaaattgtaatgggtagacttcaaattaaatatctaattcgactcctttccacttctaccctcatagcattagagacatttggaaaaatgaaaaaaatatagtattttatggcagggtacctcaaccccagagccacagacccgtaccaatccgttgcctgttagggacccgattcgcaaagcagtaggtgagcagcagcgggctagggaaggaagcttcatctgtatttacagctgctcctcatcactccatttctgcctgagctccacctcctgtcagatcagcagccacattaaattcccataggagcacaaaccctattgtgaactactcatgcaagggatctaggttgcatgctccttatgagaatctaatgctgcatgatctgtcactgtctcccatcaccccccagatgggaccatctagctgcaggaaaggaagctcaaggctcccactgaatctacattatggtgagttgtataattatttcattatatattataatgtgataataatataaataatgtgtgcaataactgtaatgcacttgaatcatatggaaaccatcctccaacccggtccacggaaaaattgtcttccacaaaatcagttcctggtgccaaaagggtcagggaccactgttttatgggataagtgaaagctggatttgaatccaactctaccttttacttcccatgtgaacattaaaagatgacttaatgtctctgaatctttttttccttctaagtaataactaccttgcagagttattacttgaattggccataaggtaaagaggacaccaaatacagtaaataataacataataataaagaaaccttatgaattctattcagtgatatccatattgaggtatttaaggtgaatgatactgatgtcagcagtttacctggatatgcatcaaaaatatgattgattgatggatggatcggaggaaggaaaagatatgtgatcaaaacgagtatagtaaaatgttcatggtggaatctagatatatagatatcacttgtaatttttaaaaatgttattgcatttttgaaatttgttatgttaaaatattgggtgaaaattctgatgccctggccatgtcccaaatcagttgaatcagatctctggtgtattttttttttaagatccttggatgactccattgtacagcaagtttgcaaaccactattctaacttctcaccacccccttctttatagcttacaaaattatatttttaaatgtcaaatgtcacaatttcactttccttcttcaagaactgattagacttctagcttctcctatgctctcatcttgcataacgttcatttgcacgtggttaaaactgataggcaataaataataacccatctgtcttttcctgacccaacataactaaaaccttcctttcaaggcgaaaatgaactataatctcacagacaagagtagctatagacaactaattctttctggtctctcgtggtcatgggactattcaccactgccgtccctgctgtctatttggtggaccagccagttttactgtgacccataccatggctcttgagaagcatgaagctgccgaaatcgcagttgtagggttaatggaaaacatggtgaagtatagcttacatatatatacaattttggcacaaaatgaagcctaagaaattgtaccgggctgggtgtggtgactcatgcctgtaatcccagcactttgagagaccaaggtgggcggatcacctgaggtcgggagttcgagaccagactgagcaacatggagaaaccctctctacttaaaatacaaaattagccaggcatggtggcgcatgcctgtaaccccagctactcaggaggctaaggcaagagaatctcttccaccctggaggcataggttgtggtgagagaagatcacaccattgcactccagctggggcaacaagagcgaagctccgtctcaataaataaataaataaataaataaataaataaataaataaataaataaaagaaaaagaaattgtaccaggaagtggattgggaatgctctatatattctccccctccaagaagtttttttaatttattgtattgtgaaagatctgcagctatttattttgtgtggtactcttttgcaataaactacttctgcataaatgaactcaaaaactttgatattcatgaaccttcataatgttgatctagtacatcttgcccaactagcccttgggccattccttccatgccactggttgaaaaatatgctccccaccccagtaacatcagcatcagacctctgcaaccagaaagattccataggtaatgaaatccaaatgctggcatttggaagtcaaaccagtgtattttgaaatggaaaggcaaggggaagtgcatggagcaagtacagcatgtgctacaacttcagttcataccctccttaaaatactgtgcaactaaactgtcaattgcccattgatagagatagtatctttttcagctttacaccttccgaattcaacacactgctagcctcaggactaagcgctcaataaatgtttatcaaaagattgagtaaatgaatcagtggtgaaataaaatgtacaaacacatacgcttcatacacgtttaggaagcatttctagtgagctttgtggatattttatttcttaaaggttctttttctttccatgttcatgttattctttattttttaaaatgttgcttctgcttatttctctttctacggcagctatatttacttgcctgagagcacagcatatactgatgttaatcaaactttagatgaaacacctaaaatgatagaaaagaatctgctctaattaaataataaagcaacccctacaggtttagacatgtgccttccggtgtgggaaagaaaaaatttaatgaatgtagtagttttatgccaagaacatttccctcgtgcacctgtgttttaataagatagaatataaaatagcaaaaggggcccgacttttgtgatgatatttactcataaggtagtaagtcagatgtgatgacattttctttgacttagagctgctatacttgggtcagatttcagttcagtaaatttgcagtgaagttgtctttctaacatggtgtcatcctggaactgccctgctcccacagttacatacaggctagggagtgggtaggagtgggggtgaaatcctcttaatgtttatggtgtcagtagattcaaactaaaattagccttacagccatactcctaataaggggcccctggcatatttaattgatttaacaaatttatcaaaaatagataaactgaaatctgccttgaaattaattactgtatctctatttttataagaaaatattttggacccgttccctctgccttatgggtgcaactcccggcagaataggtcatgtctcctgaaaatagttcttattttctttactacttatgacctcttatagcctagaagtttttccttgctatttctagttgaaatgctaatctggcataatttctagttgaaatgctaatctggcataatttcagaactaattttctgttaatgccacttggaacatctaaattcctcctttttcaataatactatatttgtgtgttgcaaacacacacaaatcatactatatttgtgtgtatatatagtaaattccaacttataaaagtaaaattggaatttttttctttctttggaaaattattttataattgagaattataaatgtcacttttttaaatgctgcaacctttgagattggtttcaataaagtaaaacttagtaaacattaagaaaaatgatagcttgatatgttcactaatatggtaaatgaaaacttttatgtgtgtataggctcttgttaattataactaccttcacaggaaaaacagtcttgtggaaggtaatggtgccagtgagagaaaatagagaaagtagaatagtagtaagagagaaaatagaatttcccgtttagaataaagctaagtaaaaagtgaattgtttcagttttatttatgtatttgtaagtgtggtctcatgccatatatattcaaagatagacagagatcttaatctttaattttttatggccaaagaaaatgagtcccatgtaaaagggacattttcgtaagctgatctcaagtggtgtattttgatttgccgcagcagcctatggaagaaatatcattttggctgcctaagaagaaaaatgtcatacctttctattttttattcatactccgcatatttggaattcgtattctcaccatacttttgggaagataacacgaaattgccttacttgcctcgaaatcaaaatctgccattcgttttaaaataaaatggctttttcatctcattttcctttagcagaaaaaagtaagttaaatttttttgtagctgtgttaagtgtactgttcctccctcgttgagaacgaaacaaagacatatgattccatttactgtaattgttttggtttgcccaattacaatagcagtaaaatcatttacacatagtaaaatgtttgagccttaaagggcaagaagactaaatttagctgaagatatacaactttcatgtgccaatgaggaaatgtataaaatcagttatacatattttcctcattcatagatattgaaaatattcatatatgtgtacatgtatttgataacttaatattttctaaataacagaaattatatactgtatatatatttggatattatgattattgttattgccaccattgagcacttactatgggctcagaaaacttcactgtattatttttaattcttataacaaccctgtgaaatatatattatgcctatttcacaaatgagaactctgaaatcaggaaattaaatcacttgctgaagtttacaaagcactgttaggcaataaaacagaatttcaaactcacgtttgcttgtcttcaaattttgtatgctgtacaacctgattgttttactacttgttcttaatttcaaaaaaaatcttcatactaaaagatgatactttgggagttctaaagaacatgtttttggccgggcgcggtggctcacgcctgtaatcccagcactttgggaggccgaggcagaaggatcacgaggtcaggagatcgagaccgtcctggccaacaaggtgaaaccccgtctctactaaaaaatacaaaaaattagccgggcgtggtggcgggcgcctgtagtcccagctactcgggaagctgaggcgggagaaaggcgtgaacctgggaggcagagcttgtagtgagccgagatcgcgccgctgcactccagcctggttgacagagcgagactccgtctcaaaaataacaaaacaaaacaaaacaaaacaaaaaaaaccatgtttcttttcagaaggtatactcatttgaagtggataccaattatttgtattaaaattacttatggataaatttgaatctgcaaaaattaagtgcaacattattttttggcacctgttataggaggtaaaaatggtgattcaatatagtttctacccttagggagcatttagtgtggtttagacgtaatgacactaatgtaaattagagtagaataaattctttaaagcaggacaaaaggagtgttaaagactacaaagtttcagttatggaagataaaattctggagatctattatacagcatagtgcctatagctaataatgctgtttcggacacttaaaatttcctaagaaatcttatgttgtgttcttaccaccagtaacaacaataataaaggggacaagaggaaattttgagtgatgacagatatgtttatagccttcatggtggcgatggttttgtgggtgtatacttattcccaaactctttgattttatatatatatatatatatatatatatatatatatatatatatatgatgaaactctttgagatatatatatatatatgtaaaatatgtacagctttttgtatgtcaatcatacttcattaaggtggttacaaaaaagaatcaagaaaaataatcaccctaataaaaagagtgttattaaagaggggagggattacttctaattggtagtatcagaaaggttctcatggaggaaggtatagaaaaatttaggacaatataagcaacgatactttaagaaaaggaataatataaacaaaaataaaccaaaagatgaagaaccaccaaggatgtttctgaaaaatcaagagaaattccattttgatttgagagtatgaggtacttgtcatgatatataatgagaagtgtctagaaatatgttattttgagcaaatgctgcttagaaaggaggttaggttatttattaatccattcctttgaaatataaatttcatgatcagaaacacgtgagtgtaactatccaataacaacatgatttatttccaagaggatagtatattataggagaagtaggattttttctctttcacaagctaatacagtgtttactgattcaaatgacacttaaaaaaaacaagaaacaaaaaacatacactataagctatccttattcagctatgttattgtcttgcattcctgattagaaacatacaagttagactcccaaagtctcagttttctcatttgcaaaatgaataaaatgatagtacctaccccaaggtgctgtggagtatatttaatcatgtacttaatctgaagttttaattagagtgcatagcatatatttgtggttgcttttgctcctatttctgggtaaaagttcctacacctattatatatgttttgtgtttgaatgaagagaaaggcatcattatttcaaatatcccctctagccaacaaatgaaagctaagacttggaagctaggatgtctaacaccatatcctcttcatgtggactatatagtagaggatatgtaaattaagactcaattaaatgctcacattttataaaggagacccttgaatatatcaaatcctcagagagtatgtcagtttaaacttattaagaaatttaaattatttaacttagcctgctgagtcagtttctgtagctgatttctccaaaaggtcttggtattaaaagtagcattacagatcactaatagcaaactatttctgctactttgggtatttttacagggtgctaattgtgccaaatcaagacattgaaattgcataattttaggttaatattagcataatcctacatattttttcagaagcagtgcaggaatagtacaccctgaatatttttccatcatgatggaattttcaaatatcacaacctttacattgtcagttgtctgctggaacattatattgtgtcaaagagatttataaaagagaagggcaaagaaaatttgcggagttctagacaatagtaatatcagggacacttttgctttctttgttattactaaggagttaaataatcagataccaagcataggtaaagaaatgaatctctaactatttgagtacttatcaatttatctcaaggatatttacggtgttttcccctaagccaaaatagagtgcttaattaaggtccccttagccccctaaaaatcactcaggccaagtttctgatatgtgtgtatacttatatacatattaaagtatatgtatttttgtgtgcactttcagatcaaaaagtcctcgtttatctaaagcaatttcagcttattgatgaggcttttctgttacagcgtcctcctccacagatctgcctgtctagagatttaagcccaataagagtccagcaaagtttaaacaacactttagaaatctaaagaattttaagatttattttaatagtcttagtgataacctgaattgtttgtgagttcttacaaataatgcaatcaacatttaagtaattttattatttttttgtttgtataaatttaaggtatacaagtacatttttgttacatggatatattgcagagtggcgaagtctggttttttgtgtacccatcatgcaaatgatgtaccttttctccattaagcaatttcctatccttcgcccccatcccaccctctcgcccttctgagtctccagtgtctattattccacactctgtgcgcatgtgtacacattatttagcttccacttgtaagtgagaacatgcaatatttgactttctgtttttgagttattccacttaagatgaccaccagttccatccatgttgctgcaaaagacatgatttcattctttactatggctttgtagtatttttcattgtgtatatgaaattgtttattccatacgcaatttgtgtgtgtgtacatatatatatatatatatatatatatatatatatatatatatatatatgcttagacttagaagctaggatagacacacaatggaatactacacaatggaatacattcattcacacacatataaataaaagaatatgtggagatatatctccacatattctttatccaatcatctgtttttaaataatgctattgacttctttagggtgaattttatcaatattgttttggtttaaaacactcaccttaaaagagtcacagtccctaaatgtgcatcctcatatttaaattaggtctcagtaaatttgtgcaaagtgtattctttttaggatggtgttgaacttgctaaattatttatctttaagaatcatcattttgtgtcttttattaatgaaaacaacaattatgtgattgctgatatatttggaaaatgatttctgatgtagattgatttttttattctaaattctgtgtcggtattaaaaatttatagattactaactgtattaatatcgataatactaaattttattgctatttataacttggagtgtactttcatcctcctgaaaaagctgaatgaggtaggcagtattattctgggtttatgtgtgagataactgagactcagaggtaaaatagtgtatccaagcattcatggctcttaaatggaagatataaggggtttgtgaaattactcatggacttttttattcattcattcagttattaaaatgtattcaacatttatcatgtaccaggaacagcgcttagtaccaggaattcaaaggtgcataaaacatcttccttattctaagaggtacatagtgtactggaacaaacagccttgtaaatacataattagaacatgaagtagtatgttaatagaggttttcacaaagctgtggaagcttgtcttatgaagtaactaattccaagggagagaagccttatggaatagtgacattttagatagggtgtcattctaaaatacagcaaaaggcccacagtaaaaaaggaattttggttgttatgaaaattttcagattttctatgttttcagtacagtatacatggtgggctatgtgaatgtttgtatagggaccaaagtaggaagtgaggttgtctgttagagagcgctgagaaaccgaaaatagggagagatgagttggaatatgctgaggaaaagttattaggagttttcaagaaaggccacgacagtggggctagagagaagaggctaaattaaagagtcatttctggtttagaattgataaaatatagagacaagcatgataagaaagaagtcgagaagtaaacgatggtctcaagatttctagcttggaaatcattgactaaaattaaaactaaggactggattaggccattcttgcattgctataaagaaatacctgagactgggtgtttataaagtaaagaggtttaattggctgacgattctgcaggctctacaggaagcatagcaacatctgtttctggggaggcctcagggagcttttactcatggtggaaggcagagcaggtgtaggcatttcacatggcgaaagcagagagagagagttggtggtgggggtgggtggctacctacttttaaacaaccagatcttggagaactcactcattttcatgaggacagtaccaagaggatggtattaaaccgtgagaaaccaccctgatgatccagtcacctctcaccaggccccacctccaacattggggattacaatttaatatgagatttgggtggggacacagatccaaatcatatcaaagacttgcatgggaaaataaggaattgttgacataacatctttgaggttcacatcaaatgttctgatgaggatagtccaagtagcagttggctatatacctcagataagggctgaaatttggagctatgtcataatcagcctagattaagagtcaataatctcctgcccatgggccaattacacccaccacttgtttttgtaaagtagtattgaatcccagccatatccatttgcttatgctccatgtataccttttttttgaacttcaaggcagagttgagtagttgtaacaaaaaccatacggcccacaaagcctgaaatatttgttctcaagatctttatctataaagtttgccaatacctgctgtagatgttagttgaagctttgaaagcaaatgaggtttcataaggcagtgtccatacaagacatttaacaagtttacctataaaaactagaattcctttgaggggaacacatcctagtctccattaagcacagtagaagagtcccctataatgggaaagaggtcactttaggtgttgatgttggtggtacaggtcaaagaaaatttatctttgctgtttattcagaatgcaataagtgaagttatgagaaataagggaaaaaatgtgtagaatttcaacagcgaagagaggggataaaggcatgagaatgagttcctaagctcaagtattataaacactgtgagaaacttaaaatcaaagtatgactccaaacgtatttgaagcctgagaacaaggctcacaacctagggaggattagggatcaataaaatagagtgttacaaagtataatgtcaatccagagttgtaaaaatatcagcattgaatatattgaaagcagtaaaactgaatgaggagactatcattttatatcactgtgtttatttctttgccttgttctataaatatttaaaattataaaatttttattaacagtgagagcagaactaccagagtgagcagatcaaaattgggacagatgcttttcactgcacacacttttatttttctgctgttcatgcattatcttgtacagtgcacatgttttacctaaaaaattaaaatggagtctcctgcttaggaaaaaagtatatattctgtttcaaactatatacaaaaataaaatcccaggtgactaaaaactgacatgagaaaaaaacaaattgataaagcttttacagtaaaatagaggagaatatgttaattaatatagggtaagaaaaaattgcttacacaaatgatgaagcactaatcatgaataaaaataataaagtggactaccttgtatattaataacatctatacatcaaaagacagcactgagagagtaaaaatgaaacccacagagtaggataaattatttggaatacacacataatggatgaaatgtgtgtattcataattataaagaattcctacaaatctttcagaaaagaacagataatccaatagaaaaatgggaaaagttcttgaaaagtgaaccatggcacaaaaagggcttgtggcctgctggcaatattctgtatcttgacctggatggcatttttaaggtgatcactttatagtaaataactaatgtgttttatgcatcatagtaacgttaagatttttgtcatctttacaaaataagaaatccaaacggccaataaatatataaagaatttctaagtcccattaatggtccaggccatgcaaattaaaactaaaatgaaatatcactgcttaccaaccagaatcattgaaatttataagtctgacaattccatgtggtggtgagaatatacagcaattagaaatttcacacaatgttacttggtctgtgaattgtaaatagaagtgtaaaattacactactgcttcttggagtgaaatccatttggcactatttagtaaattcaaagatctgcataacctatagcccaccaatttcacttctatatatacactctacagaaatgcatatgttcatattccaggagacatgtttgggaatgtcatagcagcatagtaatagccccaaaccaaaactacttcagtatttattaatagtaaaatttgctatagtttgaatgtgtctctttccaaattcaggtgtcgataatgtgctagtactaagaggtagggtgtttaagtggtgattaggccatgagggctccttctttgttaataaaaataagacccttataaacaaggcttcacgcagcattcagtcagcttgctctcttgcccttctaccttctgccttgtgaagatacagcaggaaggccctcaccagacaccaaatgccagagcctttatcttggacttcccagcctccagaactgtgagtgaatacattggtattatttgtaaattacccagtctcaggcattttgttataacagcacaaacagactaagacaatcatacagtgagaaattaatcaacaactaataagcaaagaggtagattaatcttgaaactatgatatagagtgttccatttggctgctggaagttttatttcttggtctgggtgatggtcaccatgggtttatatgaatggttccctatattatgtttcacaacaaaaagcatttaaaaagtaaatatatgtaatgtactcagggataggcatggccaaccatggattctatgctgaaataatgattcagatttcatcagcaggctaatgacactgcctatttaaatactttaagtcctgaaattaaagaaggtaatttctcaagaaggaatttctaatttatgggtgggtctattccccaccagagagacactagcatggctcagattctatgttggtcattttatttgcatttaaagtcttaagccaaatagaggtacactaataatgacaacaactactactactcatacttgtggaacactgccagatgctgttttaagaaatttgcattttcatttgtaactgagcttacttgaatcttctctctttttttcttggttaatctaactactggtctatcaattttacttatcttttcaaagaatcaacattttgtttcattgatcttttatatttttgtttcaatttcatttagttctgctctgatctttgttatttcttttcttctggagctttgtgttggctttgttgttgattctctagttccttcaggtgtgatgttaggtagtcagactgtgaactttcaggctctttgatgtaggcatttggtgctagaaaatttcctcttagccttgcttttgctgtatcccagaggttttgaatagattttgttgtgaatgtgatgaaaacggaacatttgtacactgctggtgattgtaaattagtacaacctacatggaaaacagtatgaagatttcttaaagaactaaaagtagatctaacatttgatctggaaatctcactaccgattatgtacctagaggaagagaattcattatatcaaaaagacacttgcacgcatatgtttatagcagcacaattcacagttgcaaagatatggaaccatcctaagtgccagccgaccaatgagtggataaagaaaatgtggcatatattttcatataccgtgaaatactattcagccacataccatgcaatactactcagccgtagaaaataatgaaataatgtcttttgcagcaactttgatggagctggatgccattattctaagtgaagtaattcaggaatggaaaaccaaatactgtatgttctcacttataagtgggagctacgctgtaggtacacaaaggcagacagagtggtagaatggactttgaagactcagaaggggcagagtgggaaggtagtgagggataaaaaattacctttggggtgtaatgtacactacttgggtgacacgtgcactaaaatatctgattttacttctatacaattcattcatgtaaccaaaaatcacttgtattccaaagactattgaatttgaattttttaaaaacattaataaaataaaagatgtaaaaaaagaaatttatatatactcatttattgagctcccacaattaaccttaggaggtaagtacttcataattggtagtatacttatcttttactaaatatttgtattacttgggaagttgagggttggggagaagtagcaaggtactatgatttggggcagataactaacttatttattcgcacatacagtttggaccatgagacacgagctcaggtccctcctcctcacctaatcaaagatgaaatatgtgggatgggatgaaataatcagcagtccaatgctgagtttccagaccgaagtataaagcaacaatggatatgtcagaagtctactagggtgttatttatttaaatctatttcatggaatttactaccaccttaatggcccgaaagtgttaaagtatgccccagagtaccgaattactccctaaatgtaatttatgcttgagaataatctgactaacttgatttagaacatcagaaaataagttatgctgcacataaatgaagcagcagtgtaattttaaataccggttgcacggtgaatgagaattttaatatttgcaaaattctaaaatcacttgatttattatccttatgtttatactgacatttttttgccctttgttaagttccatccatatttcttcttactgccaagaaaaaaaactttttttcctagaaatattacagaaggcaaaaattatatttgtttccctgaatgctatttttgatgtctctacttgtttctcattgttaccatttgcttcattcatgggcagcccaattaatggagcgagacaaatttagggagcacagtgactaattagatattaaattggtaaatctaactttgtaaaaccagaaaaaatatatatatatttttttcatttggaattttccttggtggaaaagagtttaaaagtagtcatgataaaaaatgtaattttacgtagtaaattcaagaatagatttagactgtgctattaacagcacctattaaatactgaaaagtgtattttaaaattttatgtgaggcttgaaatggagtctaaagtattattactcacattaagtgtcatcacatgtaaagcccatgattttattctttaatattttgtttgaatagttacttatttcaacagtaatttcaataataaaattaaatcaactttacagttttcaaaggtttagcagttgcatgctgtaataaatacttcatatttatatatttataaagtgacagcataagtcatttttattaggtccttgaggatgcaaaagtttggattatacgaggagacgagagaaaaagggaagaagggcatttcagaaatatgctaccgatatgcaaattcacaagtcctaagacagtagcaggggtcgggcagaaagtccatcctgcctccctcttgtgggcctggaacaatggtgtaagtggaaggcctgttccccttctcttcctacctccagctctgtcttacagagctacggataccatgagcaagtgtatgaacccttacggttttcttctcttgggagaatgtaaaggaaagataacttgtagaaacttgtagataacttgtaaaaaggaaaagaattcagggtgagagggggatttgttgaatttgatagaggatggcaattaccaatatgatgagtgattgagaaacaagtctgtgcaacaggtttgaaatcgaaaatctttgaggtgtacaggatcctgaaatgaagaatgggcatttatagcagtatgtcagagaaacagtcacctcctagtagctaaaagtgttggcaaaagtatagttcaagtgattgggtaggaaaaacagcaaaccaagagtggagactgatggttgctacaaaggtggagtggtaagtcgtgaccaactggtacttctctgtgctctggttagctgctgactgtttctcagactgtggtagcaggaggagggttggagttagcagtcatttgcatatgagactgccatttaaaaaaaaattttaaattatttcatttttctgactctcaatatgaaaagcacattgtagacaaattgaaaaatatagaaaaattatataagaaaatatagtctcaccagtatggaacaatgctaactatgttgcatagatttttagattctcattcaaaagcaactctttgactccagtgatgcaaatgcatgtaacatatgcaatgtgcaattcatttttaaagggaataaacttacgatatattcataggtcatttattgtgtgttatataccattgaaaatatatgaatgctaaattattagtaaacatgcaaaaacattggcaagatcattttgttgtggaaggatatattgtatctgaataactctagaataccataaatcatcaaaggcaacattcttatttttcactaactacagttagagaatacctcttcggctaccttcggttgccttttttatgctaccaaaatgctgtctgttttacaagattttaaaggttaagcatataattattcattaaatacaatgagtgcaatgtacatgtagatacattattaaattttgggtagttaataaaaataaggggaaaaaacctctagaactatcacttttaattgtttaactgataaagtgaagcttcatcttggaaaaataatttcacaagagagcatgtgcactggtagaaaagtgccattgaaacaagagatatttgggttagaagcctctctctactatttaataccattttcaccttttggcaaattacttggcctctgttttctccaatggaaaatgggaataataattgttatgctgcagggttattgtaggtgtcaatgaaatgatgtgtctggcactataaaagcacagagcccggtgcctggctattagtaactgtttaataaatgttaattcctttctctgcccaggacatcagtaggcagatgtagcaatttaaaacttctagtgttactttaaattcctgaatgaaggtagaggactgaaaagatatcatggtattcaaaagtatgatccattgcttcttaagaatagagttcagaaaagcttgacagattcctgtactctgaggcagcaccatagccggtaatctgtaggatggctattggttttgtgctcacaaatgcttgcttgggcaggccccaggaaatctggtagactgtaagcccagtaagatttcaaatcttactttacggcagtgtttttcaccttgactgtacattgaaatcacctggatgctttgaaaaataacagcgtcagtgtccaacctccagaaatactgattaagttggtctggaatggagccccaggatcactgtttggttattgttgttgctgtgttttaaatgccccagttgattcttatgtgcaactgtcttaggtaaacatacagccctggttcatattatttctgcctcagtctcttttatgactggaaggtgaccaaatgcttgtttcctaatattctttccatgtgtagtattaacacatttgacttgtactaagttcctgcagtattccaatctaaaattttagtgactacaataaaataagaaggattaaagaaggcatcgcatagtttagtatatcggttatttaatgcttacatgtgagcctacaatatgaattatatctgtcatcttattttaaatattgacagaatctttaatgatagtgacgaattattgatttattggtgtgataatggtattttagttatatttttaaagttttatttgtaataactatatgtatttatggggtacagtgtgacgtttcagtgtaatgtttcattgtgtaatgatcaaatcaggtttcttggcagatccatagcctcaaacatttataatttctctgtggtgagaaaatttaaaattctctttcactattttgaaatatacagcacaatattggtaactttgttcatattactatgcaatagaacactagaacttattactcctttcagttgatgaacaggcagttttggatcaagaataatattgaaagtgatagaatttatgaagtaatttttatccaaaaatattttgaaagggaatatattgcttccaaataatttattacaatgttaagatatttgtaaatttctagaattaaaaaaatatatttttaggaaagaaaatgccaatagtccaaaatagttgctttatctttcttttaatcaataaatatattcattttaaagggaaaaattgcaaccttccatttaaaatcagcttttatattgagtatttttttaaaatgttgtgtgtacatgctaggtgtgtatattaatttttatttgttacttgaaactaaactctgcaaatgcaggaaactatcagagtgatatctttgtcagtataaccaaaaaatatacgctatatctctataatctgttttacataatccatctatttttcttgatccatatgcttttacctgcaggcgatttgacagatctgttgagaaatggcggcgttttcattatgatataaagatatttaatcagtggctaacagaagctgaacagtttctcagaaagacacaaattcctgagaattgggaacatgctaaatacaaatggtatcttaaggtaagtctttgatttgttttttcgaaattgtatttatcttcagcacatctggactctttaacttcttaaagatcaggttctgaagggtgatggaaattacttttgactgttgttgtcatcattatattactagaaagaaaattatcataatgataatattagagcacggtgctatggactttttgtgtcaggatgagagagtttgcctggacggagctggtttatctgataaactgcaaaatataattgaatctgtgacagagggaagcatcgtaacagcaaggtgttttgtggctttggggcagtgtgtatttcggctttatgttggaacctttccagaaggagaacttgtggcatacttagctaaaatgaagttgctagaaatatccatcatgataaaattacagttctgttttcctaaagacaattttgtagtgctgtagcaatatttctatatattctattgacaaaatgccttctgaaatagtccagaggccaaaacaatgcagagttaattgttggtacttattgacattttatggtttatgttaatagggaaacagcatatggatgataaccagtgtgtagtttaatttcaacttgtggtgtcctttgaatatgcaggtaaagatagattagattgtccaggatataatttggttgctaaattacatagtttaggcataagaaacactgtgtttattacacgaagacttaattatttttgcatcttttttagctcaaattgttcatgttgcaatagtcaatcaagtggatttgaattgtagccaatttttaatgccagaaaatactgattaagacagatgagggcaaaaaacacccagtagtttattaaatactttagatatttcaaaatgctggattcacaaaagcagtatcacatttgactttacaagtcttcattctcaaatatgtttccatagtaaatatgccctttaatattaaggagttaagcatttaaacacctatttatatgataagctatttaaacacagaaaatatttttaaaaccttgtgtaattatatgtgtatcaatcaaacttgcatgcacaccagcgttggcatttgtatagagaggaaatgtatggattcccaatctgctttaatatagaagatacattttaaaaatagcactgaagtgaattttgggctaatgtagcataatggggtttctgcctgagaggcagaaacatattagagttatataaaatgttttggggtagatatagaaaccacttgccattttcaatgatatccaacccaaggtagttatatatttcaatttatattttattatcaaattagtacttattgtgaaaaaaatcaagtaacatagaaatttgtaaaagtacctccattctactctttggaggatagttgttcagtatgaattttgctacatatttcaggctgggtttcttggaaagccattgtaaaatggagatttgtatgtagaaggttaactagggagtacttttacgatgaagcaatttgttttgatgtaacttggtgtagttttcttcatgtttcttgttcttgaagtcagttaagctcttgaatctgtgcatttaacatttcatcaaatttagaaacctttcaaccatttttttaaaaaaaatggaactccaattgtacatttattaggctccttaaagtgccccactactcactgatgttatgttcattgtctgtttggtctctcttttctctgtaatttgttttatataatctctattgtcaaattgactaatctttttcaaagtctaatctatggctaatcccatgtagtatatatttttaacatcagacattttcatctcttagaagtaaaagttgggtctttttatttcttccatgtgtctactcaacatgttcagtctttactttcttgactatatggaatacagatataataactgttagaatattcttctctactaattttatcatctgtgtctattctgggttaatttaaattgatttatttttctcctcattaagtgtgttgtttaactgcttctttggatgactggtaatttttgactatatgccagacattgtgaattttaacttagcgcgtgcttgatacttcaaataaattcaaatatattgaaataaatattctcaaacctcgttctggaacacagttaattcacttggaaacaatttgatcttttgagaatcttccttttatgctttgttatgaccagaacagtgtaagtttagggctactttttccccactactgaggcaaaacccttctgagtactctctctgatgtcctgtgaatgataaaatttttcactggggctcgtgggaacaggtggtattactagccacgtgtgagctctggtgattgtttcctttaattcttttgtgaagttctttccttagctttgagtggttttcttgcatacatgaactgatcaagactcagatgaagaataaaataaagctttctacaaatctccaaaatttcctctgtgtatatatcacctctctggtattttgccctgtgatcactagtcagccttgggctgctgaaactctcagcttcatcttttaacaaaagcctcctggcaaggatcactgtccttcaatgtctgatgttcaatgtgttgaaaaccgttgtagcatatattttgtctttttttttttttttttttttttaagtgtttcaggtgtttcaggcaggagattaagttcagcctcctttactccaacttgaaaacaagtccaaaacaaactattttgatgtaatttgatcttttaatacattaacattacacaattttgtgaatatatcataatttaaaattttcagagaatgtctaatggtcctcatttcttgacagtgtggtttagttgaaactgatgaacattttatcaaaacttttcccctcaattggatacttttttttttttgagatggaattttgcttttgtcacccaggctggagtggcatgatctcagctcactgcaacctctgcctccaggcttcaagcaattctcctgccttagcctcccgagtagctgggattacaggtgcccacccccacacctggctaatttttgtatttttagtagagacgagatttcaccatgttggtcaggctggtctagatctccgacctcaggtggtctgcctgtctcagcctcccaaagtgctgggattgcagacgtgagccaccatgcctggccaactggataattttaaaaagaccattttatttagtctattttttctcaatctatagatgagataagaaaaatcattctagatgtccaaggaaaaattctttcagaaaagagctgtgaatgatatcacaaaccccccaaacagttaaggtatttctttcctggttattttatgtccaaaatcatgcatatgaacatgtgcacacacatgagcgtgcacacacacatgaatacatatacacgcacataatgtaccttaggttatctttccattctgagtaattatcgtaaaatgggtaaaatcaaccccgtaagataccttcatcgataaggcaaatcaaagctttggtaatttctgctatcttggcctttgttgattgactaataatgaataagagaatgagtttcaatatttactatgaaattattttagaagacaggatgtagacagtggctgttagcaggcaattgtttggcatgagccagtaatggttactgtgaaaaaaatcaaccaagcagcccatatattaaacaaacacacgcagaagcacgttggagtctgaagcctcatatgtacaattttcagtaaagaaataacttttagatatgaaataaacaaatagatatatgttgtaaacttgtccctatgtattttgatcaaattgcatcatatttttttcactttaaagaagagaatttagtgctttaactgagacttagtgttatcattcaaaatatactgactgccaatagcagtagaaagataatctggttccatgcaactctattttttttcctctgtcgcaagtaaaagacaaaattaagtacatgaattagtgctttttgaagatattccagagcaatataccatgccactatggagaacctctctaaaaatatcccatttttttacctgagaaaaatattgatcatgttatatgccactcaaattggtttattaaattcgttgaatgatatcagcatctcttaatgcattcactaaacaagcagtaattgagtgcatatacaaagttttatcatccaccaaaacagtgacaatccacatgaggctctaatagaagtttagaaagggggttaagtggttaaatgctggactcagaaagattggattcaaatcccaggtcctttagcttaatagttgtagaatcttgtgaaaatatcttaattcttttcatgtctctgatttctcttctctaaaatggaaatataaatgagatgtgtataaagccacttggaatagcattttgcacaaaataattactcattaaatgtaagcccctattataactaatcactctttataagtgattagttcatatcaatacaaactaagacttatttactgaattatcgtctctaaacatccacactgcagaaaaaccaacctggaaatttcataaaaccttatttttatgtagtataatttcttctcaaagcataagggctcttggattaggaattgaggaaaattccaattcagccaaacgcatctgtttcagatagctgacacttctgcctactcatttcctagctaacaagaagaaatgttaatgggagttttcaaaggaaaagctgaacaccatgaaggaaagtgacacaaataatgttagctcatatattgacagggtgaatttgtgtgctttcaagtcccttcagtgaaaataggaaagtagaaattataaaatgccctaacatttaaagctagcatgttcttggagactaggaaaaaataagttttaaaacatgggctatgatagaatgagatggaaaatgtttgtagttgccagtagaaacaataacaattaccattagattaagtatttaaaccagctgaatatttttattaatggaaatggcatctgttttatgaaataatgctgctgaatgaaccatattaaaaatgaccagtatttcctgcagaacgttgtcgcagacatacaagcctgagaccctaaaatcttaaggtattccatttgaaatcgaccttaagacattaacagtagtggtattgtttagatgaaattttttaggctttaaatcaacaaatgttaagcagacatggggagcgaaacaccagtgtgttattctgacatgaataaactgctgtttttagggaaaaaatatagtcttgttaaggttaagctaattggttttctggtatcttttgcaatgttagtgtgttttactgctccataacctatgttatatggtaaatgtgcaatatatttatatatgttgctgtaaagaaatgtaataaaaaactgtttactttgtgatatgaaagtaaaaatttattcattgtcattgagcatacagaagtaaatatggattacatatgtcatattttaatgttcacatggtcccaccatcaaatgttgaaaaacttatagtttaacgtcatattctattgaagaaaaatacactcccttttctcaaatgtgaaatgtccagagagaatggaaaattacatataaagcatgtagttatagcatggtgaccctgctgtgatctctcagatgaggaacaaaagggagaaagaaagagcacactggtgctttggagttgagagaaggcaaaaaaagagtacaaaaatgtcaaagccaagtttagctgctcttcagctctccctttagctgctcttcagctttaccttaccatggttattagtgattgaagaaaattctaaagcactttttaaaggacccaattctgaagagtttagattcagagagcacaatggagttggagtgactcctgctcaaaagtttgagacaagcgagtccatgaaaagaccgtcctcctcttaatggaaatacccaggttttctcattcttctcgccttgctttcagcactcgcagcccagaaagcccttatctaacaggtactgccgttgaaaggtcattgacttgtacaaaaatgatgagtgctgaatagatgtgcataggtcactgacagtatctgctacagagaatgagttttcgtatttttattaggatacacctaacatggcaatctactgcctcaaagaactctataggaggtaagtgaatttatattaatacagattgaattaaaggataatctagaaaaaggcatatgatgtaaaaaaatcagacacaagtatattttctgtatagtcagtttttacattgtgatttcaccagctggctgctgagtttgacggcttcttaacagccacactgctgagattcaaatgctgatagaaactttgatggaaaaatcactggagtaaatatttctaccatctgttgcccttcactgggaccctaacgttaagaataattcataccattgcttgtcctttatatttccccagcagtaataaaatttcataagattttgttttgtggtcacaaagctatcctggtttctgtaactagaagacatacactagcataagggaatcagccggaaaatttactgctaagagaatttgtctctagtcacttactttaaggttacagcaatgtgtaagtgtgggaatacattttaaaatgagcttttcaaagttattagctggtagtggcatgagagttaagtctcttaatacagttaaacagttgggcacttcatccttgcgtaaatattgttacccttttattgctgcttggaaactcctctgcaactttttggcccctatccatcttttcagaagtagtaaataaccaatttactgggagtgtggtaccaggcagaaattccgagaggggctttcaatccttgcccatcaagtgtatctttcagaaataagtatattaaaataattggataatttcagtggcttgttattagacttccgttgtccagcatggcatgtttaagaagatgacagattttcatacattattggaaagaagcaagaacaaaaaaacataacttactgtagtaaccacggtaaagaactgcttaaaatgcaggataaacatgtcatccctaagggattcccattcttagagcatgaaattatcaagagagtaagagactacaaaaaatgagaagaatgctgattgcaaattccaaatagaaaaaatcaaaacaaaactgcgcaccatcattctggaagcaatgagaagcagaaattgtcatttaatgaaatgtaagattaaagttaatagaagtaattttcatgaaataatattttgcaaggacgatgttccagccatattgatcttcgtgttttcttttcacatcccttcttactgttccctagaatgcttgtttctacctttaaatttgcttttctctctaccagagggctctaccctatctccagtttctcaccatgtcccaatctactccctctcagaatttttgtacacttccctttatatatatttgtgctctaattttatattcacagatatgccttttgtaactcccccatcttaaagaaagcacacacgtacgcacacatgcacacacacaaaattgaactctttctgggagatctgcttaactttcttcataactctgtcacttgctgaaactgtagtatgtgttttcatgtttattatcttttccattagaatgaacatattttgggtacttggtctttctcgatcaccaatatacctcggtacgtagaaaaattgattcatatattgaaaatgtaatattcagtagaacgaataaatacataaataaatttaaaaatgatacttttattgtattacctgagacaaatgatccccaagtttgtccttgcttttcatagccaaaacattctctcttacattgagcttccttcacctcttctgtgtacagagcacttaaaattttcacattgcctgatactttaacaatatgatggccctgttctcttacccattggagcatatgttaaataccagaacccatgtaacaaacatatattgtgatcctactgtgtgcaaagcagatactgcttgctgctaggaatacagagctgactaagagctccttttctctttatgagctcacagtctcatgagttcaacgtcttaaggcacaacgtctaaagcaaagggcagtaagtaaacactccagaaagtactggatctggcctaggacaaatggtgggttgtttttccagctgttatttttcctgccccctaattgacagtcctccattacacctctgggatacctagtctgacttgggaaaacctgactttgggaatcagaggcagtctctcttgcttatatatgaggaactctaatggatacttactgtcattagagaaactctgcttctagcctggctccttttgtaaagaaggttgagtccccttggagagcctgcagaacataaccatttgcatgtaatgaacagtttgtaatactttgagattgatgtgcaatttctatttgacaagggaaaaacaattaggattaaccgtggtcgtatatcccagaataccaacgttgtttccacactctaagtgttgttgggtcattatatgagattcataattttgtcctgttgtacccacgtttgcattaccattcagtcttaatttattataccctattaaaagtttttttggtaatttgttcttattgctactcaggcattaaaatgtctgcaggctgtgaaaatgaataaatttaatgtggcagcatagttctcaaaatcctggctttacaactcatagtacaggcttgtattgtaaatcctagttaacatggatttatttgaaaatccaattttactgctaatcttaaataacacatttttcaaacattttatccttgaatttctatttttttataatttatggctgttgtatgtatttacaaaaggacaatgtgtgtacttttaaatactagtaatggattgctgaaacaactgtaactttaaaacaatgcaattgttaaaaaaataaactgtgcagcctggcttaatggaggcttatgaacatatgattaagatatatgctataataagcaaattcactcaactgatagttcataggaactttcaaatttaatctcataaccagtgctatccttcaaagaatggtcagggcaatttaacgagtacatgaccacgcaagataatttcattgaagagtggctgaactgttgaaatattttctagtctccttgggatatcattaagagcagaaattttgaaatggaattgtaatgatgttcagaaaagataagtaggtaactctcttaatacgttttgtgctgctgtaacaaagtacctaagactaggtaataatttgtaatgaacaaaaatgtattggctcacagttctggagactaggaagtctaacattaaggtgtcagcctctggcgagggcctacttgatatgtcatcacatgatggacgattagagggcaagaaagatcaaaagggggctgaactcccacttttataagggaaccaaacccactcgtgagggtggagccctcaatccttaatcacctcctaaagctcccaccccttaatactgtcacaatggcaattaaatttcaacatcagttttggagggaaaaacattgaaaccatagtagtgatactgactactaccacacagggcttgggaggctaccctagctgttgcacccaagagatgaatcttctaatgtgattacctttatcattttttttactttattaaaatacttttattttacatgtatacttttgtctacccaccatttccatgtctgaccactgctactactatgtcctagcataacattccatacatccttaaaaccaagcaaagggtggagttccatctttaaaaactaaacaggcattttggacaacacattcttggcaatggaatctggacaacatttatcaaacatggtagggaaggttctcactctgcattatcaaaacgacagccagatatcaactgttacagaaacgaaatcagatggaaaatttttaacaaattgtttaaactattttcttagagagacttcctccactgccagagatcttgaatagcctctggtcagtcatctggaagcaattcttcacataattcatgaacttggcttccactttaggaagagaaccacctttttctatacttgcttgcatttttgctttaatgtcttctacagaactaggtcctttgggtgttttaggagtttttccttgttttgaaggattcttgtccttttgatcttggtgttgacggttttgagtcttttccattccgatttgacttttgtgcatttttggctggagtatctcatatagatttcttcactggcgctttttcttcagtttcctcatcatcaaaatcatcatcatcatcaaaatcatcatcttcatcagcagcaagttttacttttttctgtggaaccttgctaccacctccaggagcagatcgctttccagatatacttatgagtttcacatcctcctcctgttcgtcttctgactctgtatcttcctccccagctactaaatgctgtccactcacatgcactggccctgaaccacacttcaaccgtaagaccactgatggtgttatttcaaagccctcaagggaaaccatgggctgtacagacattttcaaagctgccagtgttactttaattggactgcctttgtaactcattgcctctgcttcaacaatgtgcaatttatcctttgccccagcccctaaactgaccgttcttaaagataactgttgctcaatttcattattatccaccttaaagtgatcatctttgtcggcctttagttcacaaccaaaaagatagttttggggcctcagaggactcatgtccatcatcgtccatcaggtggcaggacgcacttaggtgggagagaaggcagatgatgataaaggaccactgctcaagagaacagctgtgcaggacagaatcacaccagggagattacctttatcttagaaaacctgaacatcttgtgtactttgacacttctctacatttcacctaacctttaacatcaacacatttattcagaaaacttttacttttggagctgctctgtgtcaggctctatgctaggtgctcaggatattgaaattgatacaatcctaacctattcacatataatccaaggtttgctgaaattgatggacatttaaacaattgaaacatttaagtggtataattagcaaatggacatttaagccataaaaatagcatctaatagatataatagaggtcggtacaccattgatgagtcagagcagaggcaacccaaagagtaactagccagaagaattgggaaagcttcatagagagagcgatatgaaaataagggagagaattgtaaatccatgaaaatgagaaaaagttgaaaagtgatggtgtcagaaaaacttgtggtatgataatgacaagatgagaggaactcttggtaagcgtgttggatgcatggaaagaaatggcacaaaataatgctgaggacattttttattttattgttggttttgttttggttaatttcattttttaaatctagtatgctagtgttcattgtccaaactgtgaatcataaactcagtttgtggatcaacaccggcctttgatttttagtgaaacaaaatagaaaatatcagcattcatcacaaatagatgtttcacagattttttgttttaattgcgactgtgtgtgtgtgggtgtgtgtgtgtgtgtgtgtgtgtgtgtgtgtatgtgagagagagagagagagagagagagagagatggcttggatgtttatcacctccgaatcttatattgaaatgtgatttccaatgttggaggcagggcctggtaggtgtgattggatcatgtgggtggatccttcatgaatgatccctttggtgacaagttagttcatgctatatgtggttgtttaaaagagtatgagacctcaacccccacctgtttcctgctctcccctttgccttccaccatggttggttgtaaacttcctgaggctctcaccagaagtagatgccagtgacatgcttcctgtacagcctgcagaaccgtaagtcaaaagaaaaccccttttctttttaaagcacccagtttcaggtatttctttatagcaatgcaagaagggactaacacagttgtatgtgtatgtgtgtgttgggtgatttctggttgagtgtcacaaggttgtaatatggtgagtgtaaggaagtataagttttagaaaattaagaagccagttcagaaaactaatacttttggaaaatagtacaaaatcaactttacaagaatatacacagaaagatgtaatacaagatttatttcattgcagtaatttataaagttggtttagtgccttgcttttgcatgctgttttaaaaattaccaagaatatgacttcatgtgattttgaaatactcccagcaagataggtagaaaaggtattcttataactcttagacaaaaatttcggaaagtttaaacgctttatcccaaatcataaagctaataaatgaagaatctgggattcaaacaccatattttttttactgttcatcagctagaagttagaaatgttaagccaaaaacattaagtcactgctctgcctaataaatcttgaggaaactaataaaaagaataataccactgactacaggacaaggtcttcctaagagaccttaaatatattaagtgatgaagatgaaacttcttttattcataaaaatgttatttagttatgagtagagctctaattaaacttattttatattgtcatcagtaaagttgagacataacatatttattaatataattataatttgacccatagtgtattaaaagaaggatgttaaaaggagttgttattagagatgatgttagggttgttgatgataataacagtagtcataacataacaaagcacttcataatttaagaagtgccttcaattacattgttactctcatggtaatctctgtttgatatatagatttggcggattctatatcactctaagacataggttactgaggtgacggaggaatttagcaagcggctgtcaaatggaggacatgagcattggattgtgtatggcaagggctgatggtctctaagaaagcctcttggtttccacagggcagaagccctttgaagatcatagccaaggatttagtaattgcctccctttcagaataccctcaagagaaaagcccaccataagacatggttccctacaggcaaaactgcttttccttaaaatttactgttccctgaatatcagccttctttggctcattcaacatagttttcttaagtttcaggacagtgctgcagaccaaaagtttcaacattgaggaaaacaatactacttgtgcagtgaccctacctcagtcagggaggcagatgcctgcctttatgtgagggaataaggaatcaatcatatttccagcactcaagaaagccagtctagtgcagggagagatagatacataaacctcaaagttatgatatagcataatagttttaaatttccataataactgtattttaaaagttttatagaaacagaagagatgacctcagtctggaaaagccagcttggagaatggcaaccaatattaagtggcaaaagctttgggatcccaggcctccagatggagggtgatagcatgggccagacaggtaggttaggaaaactttgcaaaggacattacacggtacacagacaagtctgtgttttagcctataaaccacagttgcagaatgtgtttgagcaaaggcttttggggatgagatttgcacttttcaagatttaagtttgtttaggatacttacggtttgctgtatacttcctgggtttttacattataattacggtttgaactttaaaggaaaactgcagtttagcatacttgaaagagtgcaacttcaagtcatgattggagacagatatttaacagattttgtgatcctgtgatgcttattttcttctcagacataccacatgacaatcatttttaaacagtttatttctactttagcatccatctgaaggtgttgtgtatgttttctgcttgaaaataaagcagtgggctgggtgcggtggctcacgcctgtaatcccagcactttgggaggccgaggcaggcagatcactaggtcaagaaatcgagaccatcctggccaacatggcgaaaccccatctctactaaaaatatgaaaattagccaggcgtggtggtgcatgcctagagtcccagctacttgggaggctgaggcaggagtatcgcttgaacccgagaggcggaggtcgcagtgagccaagatcgtgccactgcactccagcctggcgacagagtgagactctgtctcaaaagaaataaaaaagaaaataaagcagtgaatgcgattaagatggatttattatgatcataaagtactcaggagtcttattttaaaagacagcattactgtaattaaaaatatagggaagaaactaatgctgttttgcgtatcattctcagctctctcaaaatcagatattaagctcttgctgccaaaggagactatactgcacggtgctcacctgcataaactttgagagggttgaattgtgccaagcaattctctcaatacataaattaaccaaatatttgttgacctactgtgtgacaagtattattccaggaaataagagatccagcaatgaaacaagtatggcttcttatagagttcccaaaaaggaaataaaaggatatacgtatagtgatatccctgaattaaatttctcttttgaaaataaaaattctatcataagctgtaactgccaacacttcaatactcattcagcagttttcagggatttgtaccttttgacttatgagaatttggaagtctaattgtatcattgcactggagtcttaaagaaacagataagcgaatgactttgcctgtatcattgttgactgtacttacaatcagaaaggggcacaggacagatgccagggagtaagtggacagcccataaatggaatggtaagaaagaagaactatagtggatttggaaagttcccttcagcattttccctagacaatctttggctgtgtttgcatgatcagtatttcattcacaggatattgagctcttgatatagttctcaaaacccaaaatgaaataagaagtctactctttatttaaattcaaattccagagagttaagtaactttccaggaggtaatctaaatatggcctccttgttggggggggggggggtgtttgaatttgcatataaatagtctcacccttaaaggaaaaccacagatggtggtaatgatgtagtcataatgtacatctccacagtggtggaacaaaatatccacagttttgctttccccagtttcagtgacccatggtcaactgctgtctgaaaataggtgactacaatacaataagatattttaagagagagaaagaaagatcacattcacatgattttcattacaatgtattgttataattgttctatttttattcatgatttttaatctcttaactgcgccaaatttataaattaaaatttatcacaagtacatatagtttatatagggctcagtactatctgcagtttcagacatccactgggagtcttggaatgtatcccctacagataaggggtaaaccactgtatcctatttgtgtgaatgctacaggtgttgtgagctcataacaatatgacatcaacactgaactaatccaggatttggtagtgagagtgatgtatttgcaaggagtgagacgtggtgcctcatccaagcagagaaataattttgaaatttgcctgacaataaaaatcacaatgtgaggtctctctttagagctgcaaagtccaattcagtgccccctagccacataagatactgagctcttaaaatgcggctagtactaattgagatgggcactgagtataacacacatgccagggtttgaatacttagaaccaaaaaggaagtaaatgctcatttattgcatgttaaaattatggttttattatagttgattaaataaaatatataattaaattgacttcattttgcttttaaaaatgtggctatgaaaaatttcaaattatatatgtgtgtgattacatatgtgtgttttcacatatgtaactgatgttacatgtgaaattgattgttacatgtgacatgtaaaacacgttacctaacacgtgcatatgtatgcaacacatatgtaacgtgttacatatataacacgttacatatgtattgttacatgtgtgcttgcattacacacatgcataatatgaaattacatgtaatttcaaattacatgtgtatattttgaaaattacaaattacgtattttgttatttttgctttacaaagtcaaatttaccctatttaataaagcatcatgagttttttataactagtaaactttgagacttttgtaggagaataaataatgcttattataaaaactgattggaaaagtgagctggagcagggagcggaggaaaaaggactagagatcacctttcttcccagctccgctcctctcccaaccttttttctttccattctctcatcccaattcaaaagtgcagagttcacagttggtgtgctgatttagaaaacagatatataaacagccttaaattttctccaggcttttacaatgaaaagaagttcaatatcaaaagtaacaatataatctgtggaaaggtatagggggctatgtttttgaggtagaaactataggtgctcctggccaagcatggtggttcaagcctgtaatcccagcactttgggaagctggggcgagagtattgcttgagcccagaagtttgagtctagcctggcctacagggtgaaactccacctctactaaaaatacacacacacacacacacacacacacacacacacacacacacacacaaaagccttgcgtggtggcgcttgctgatagtcccagctactcaggaggctgaggcgggaagattgcttgaacctgggagacagaggttgcagtgagctgagatagcaccactgcactccgacctgggtgacagagtaagactgtctcaaaaaaaaaagaaaagaaagaaagtataggcactccttatatgcagctgctcacacccctcctccttcacacccctcccccttcacacccctcccccttccccaaaatttgcaaggggaaaaatgtgtgtaattggcagtatttagtggcgtgcaaccgtgagtcatcagactgcacatcctcacttctgctagtggctcagtacccaacagcactcagtgaaaactaactcatttcaaaggtgaaaacaagtgagtttggccaccagggagtgttcaaaactgtcagtgctgaagcaaatgtggagggtgttctgtagtttgttcaggttgatatttgtggtccaacccctagctgaactactaattattaatatctgtcttgatggtgcctcaggagaaagcttctcaaagggaatcaatgttcaaattatagtaggtatcttggccatggaagttattgaattttagccaatacttgctactctttcatttatagtgtgagaatgcagtgtaatgaacctgactctcactgtcctgacttgcctttctcatcgcattcacaataagcacgtcaatacgtatacacatttcatatttctaaagtttactttatttccttattgtacatcgctgtgctgctgatggaagagaaaaggaaaaacactattgattgcaaaactgttttatctttggtggcttagattttttttgtatgatatgtaacgtcttgcatacctaaggcaacacgaagctaaatagatttgcatatagcatgtattttttccaattaaatgtttaattttgttcagagtatactggggacattttgaataatggagaaaagtacaaagaaaattcataattctaccacctatcagcacagtgaaattttatgaagaaacataattttcatgtaaatcatagtgaactcacggtaggttttatttaatacagtaattggagagctggtaggaagacaaaactggttcaaaagagaatacaagaaacaaatgcttctataatgagtgaatttttaaaaaagtattctggaataagattagtgaataagatactaaactcgttgataccctacagcctttggggttatatcctctactgggtaaaaagtcatttacatcatatcagttttctaaaatttgcattgaacttcatagcgttgtaacatgtgtgggcccaaattaatagtaaacagtaagagttgctttactctgaaaatattgaagctcttgtgagggtgtgaggagtttgttagaaaacaacgctaccattattttgaaacacacacgatcatcttttgttttacttctaagttttggataatttttcttaaattatcttattatcttatccattttcttaatttccttaaccttttaaatgtttctcctaggcacttttattgatttttggaatatagttgatatgtgctgaatttttatcatccagttttaattctactgaaaaatctaaaagatgttcatcaactactatatttcaaatgcatacatcccctttcatgctaaagaaactgtatgggaaacacagtctgacattttcaggacctggtatcattaaaagtcttgacactgttaaaattaaacaacgccttttttaaaatcaaaggatacaaaagggctgtgttggtcagaggatacaaaatttcagttagataggagacataagttcatgagatcttttgtacgacatagtgactataattaataataatatgttttcgaaaattactaagagagtcgattttaagtgttctcaccgcaaaaaaatagtatgtgaggtaatgcatatgttaattagctcattttagctagtccacatttttcaatacaatgtgttgtataatacgtgatatatacaacttatattttccaattccaataagtaaaaataaatgtaaattatttgaaataaataaaatgtgaagaacatccacttttcatatgaaaccatgagatattttctgttaaaagattaaatgtccaataaatttttgatgttaacagaaacaaaaatgtttaatatttaaatacatatttgcatgctattgaccccctgaagttcactgctgggctaagtgaaccaactatatcttaagtcaaaaatgctgaaattcttccccaaatcccaaagctcatgaaaacataaacagaaaatttccaaataattctacagggaaaataagacacactatttgatctgatcaaacaacgggatgattatggttaataatgagttacttgtacatttaaaaataactaaaggagtgtgattggattgtttgtaacacaaaggagaaatgcttgaagggatggataccccgttctccatgatgtgattattacccattgcctgcctgtgtcaaaacatctcatgtaccctacaaatatatactcctacgatgtacccacaaaaattaaaataaaaaagagagggacccgaagataagctaatatttaagctcatcatacttattaagataagcaatacataccgaaagtaatagcatttaaaaccagatgttgggggagggttctaacttgttcattaaaattcaaagtcacctgtcttgttttttcttttgtttttgtttttttttttttttttttgagatggagtctcgctctgtcaccccaggctggagtacagtggcgcgatcttggctcactgcaagctctgcctcccgggtttacgccattctcctgcctcagcctcccgagtagctggtactacaggcgctggctaccacgccccgctaatttttttgtatttttagtagagacggggtttcaccgtgttagccaggatggtctcgatctcctgacctcgtgatctgcccaccttggcctcccaaagtgctgggattacaggcgtgagccaccgtgccaggccacctgtcttgttttatcatgatcccgagagtatatatgtatgtgtacagctcatctaaaccctttttctttcaacatgatcaatagattgaacattggagatattttataagaaataatgaagacaactcaatcagcacatatatatattaaatgtggaatctataatgattgcgaagcctgaagcaaactaaatattcagtaataggttctttttttccatggtatatccatttgaatatataacataaatgccttacatttgttttaactatttaaggtttatgttgttagtgtgatgaaatggctggcaaaagtcagaaactcaggaaagtttcaggcttatatctggagcctggttttctttcttcaaggtagaacctctgtgaagtgaaaaattttttttatatctggagcaataatgtagaagcttaaatgtattatccaagttgtcataagcctattatttctttacattactgaagtgaaagacagcattaatggctaaatgccatacttggctataatttatattgtttaggactggaaatgagcctgaaatgtacatttttttccaaaatagttcatgtaatatttgaaacctgacaagtaacctgatgatttcatggaataccatcaaatataaatgtgaagttttaaagacacagggaaatactcagaataaaccccctaaccacaggccagcagaagaactagacttgagaaaatgaatgggaagatagatagtaacaaatgacttctttggcagccttatatatgcttagtcttatagactgttttatggatgctctgcactctatttccagcaagtatggcatttggaacaggaccacacgagacaaactatgagttcacatttcccacaactgcacagatagaaagagggaacaacagaatactccctttcttcttgaaacaataacttctgttgaagctcactggcttcttttcagctgtttctgctagctcctcctccgcctcttgacctctaaggcaatgctcttcaaaatttcaagactgctttctaattgaaacaaaacttataagcacatttcttcccacaaaatgtacatttatttgtaaatcatatatgaatatgactaagcatgtaaacgtatgtgaaaatagaaatcaataaatataaatgcaaacacaaatagaagcattcacagttttcttttgtgtcccagtgagttgttccaaattcctcggaggtaggtatgtcacagtttgagactataccttcaatcctagggtttctggtttcgctctcctcctaggtgatagcatccatttctacggacttaactgccatctttagttgaataactcctctatctttccatcccatatttctcttgattccaaacctgcttgttcacctgagcatatgacacaattcattggctgccgcacatgcagctttgacattttatttaaaatctttccccttccccagccctcatctatttcacagtagtatcttcttcttatctacttgattggtaagcagagtccacatgattccatcatttatctcccattttatatctaatctataagcaagtaatgcaatgcaacttctgtctccaaaaatttattttgaatttgccttctcttcctctgcatctcccccatcttaggccaggtcacctctgccctcttgccagattaggtcacattctcttactactgttgttattctcttcctattcaatcctacaccgcagcaaaatggatcttctcaaaatgtcagctagataaaggcatttctgtgcttaaggccctcatggatttatcttattaggatgaacacccaactctttattatggcttagaatacaatgaattacaacacataatgaatatattatatttctatctttaccattttcttcttaagtcaacctttctcaatccatataggataatcatattagtgcttcctcactttctaaaacatctcagggcctttgcacgtgtttctctgttcttagacccagaatgctcttccttttctctttgtgtagctaggtgcttctttccatttacgtatcacatgaaatgcagtcattccctcctccttccctcactacctcacaaaaagttgatgcctctgttaaaccatgaatggaattttactcggcagtgaatagaggaaaaaccaatggtaaaagcaaccatatgaatgaatgaatgtcaaaaatattatgctgagccaaaagtcatagacacaaatatgggtatttacatgaagttaaagcacagcaaaactcaattacggtaatagaattaagaaagtggttacctctgggtgagggttggaattgagtggacagaggcattagtgactttttcggggtaatggaaatgttgtctattttgttcaggtggtgaatacatagatacattcaattgtcaaaacacatccatccaaacacttagacttttgcactttattatatgcaaattatgcctcaactgaaaaaagtttgttttcaaaattatatcaacagttgaaattcttttaaagatttgattcaaatgagattaattctgtatccatcattgatgtatgatagttttgtatgtagttaaggttattggagataattgaaagttatactcacaagaaggctgcataatatgaagtttatctgccttgatctttaatagctttcgcgatttcaacttcttcacagctctgtaagaaggcagtgtggcatgttgaagcaagcatgtgttttagagtaacacagagctggtatacaaccccatgtctaccaattatcaatgatgtgggtatgttgctggatctcaataatcttccactgtgaaatggaatgtaacacctgactcacaacgcaaaggtatttaccttatgtaatataattcctgcgatcctgggacctcccttaatcccatccacagatgccaggttaaagaccccatcacagactagaacaagttgggatgtcaaaatgaataaatattaatcgaagggcctattgtgattgaacaccacgcagtaggcactctctaatacctaccgtctccctcctttttgggggaaacattctaaatgtgcaaaaaataaagggttatttgctttctggcacttgggatcgatttattgaggatatgttagcagaacagcaaaggtgaaacactaaaagcaccatcaatacacaggcagaggtgaagccataaagcctttattttttaaattaatgcacaatatataagaggtatgttagaatgaacgtccaatccctgaaaggatatacgaaagacattcataaaattacatgggcatgttttcttaatgttcaaaatattgttttaattagtgtattatgagtttattcatgtgtctgtgtgttgtgttatattaatcttttcttgcattgctataaagaaatacctgagactgggtaatggatgagaaaagacacttacttggctcacagttctgcaggctgtaccggaagcatagcagcatctccttctgtggaggcttcgggaagcttccagtcgtggcagaaggcagaacgggagcaggcacttcacctggctagagcaggagcaagagagacagaatgaagtaccacacacgtgtaaacagccagatctcagagaactcactcatcatcatgaggatggcaccaagaggatggtgttaaaccattcatgagaaatccacacacatgatccagtcacctcccaccaggccccacctccaacactgggaattacatttcaagatgagatttgggcggggacacatatccaaatgatatccatgtttaatcagaaaaataaaagttaacagtaacagtgattttactttgtagacctttgctaatggctgaaatctagctccattccgagaacagcctgcggtacacattttgaaagatagttgattaatatgaaagaagccttatctgtagtccttaaggccattatggtttacatatatgagtaaatattccaaagtagccatgccagttaacatatatccagagtctaaaggccactgggcgacaaaagtaaaagatacatagcaattgttactttatatcacagtaattcttgtatattttaaatggatatttgcatttgaggatatccacttaagagttaggtacatggctcttacatttaagtaacatttacttaaatttctggctgcagcaattccacataggtagaaatgaagtctgaattgagttgggggtctttgcagtgctctctctgttcattggctattttgacaatgctgagagatgtggttagccattctttttcatttcatattggcaacctagagagcaattaagccttctccccttaactagatgtatgttttactcatttctggatctttatggctgactttgaatcctagcctgtggtagaaagcatggtgtcagaaggaactatgagttaagactatgcatacttggctttgagtcttgggtatcatacctccctcatagagtgaaggaaccagggattcttcttgaggcccagacccggcatccatgttaagaatacctgtgcaattttgcttcctgatatttaaggtgaaaatgcatgtttgggtcattgtgaggattatgtgagatgttacttttaaatataggcccccttattatatgctctcatagtttcaggcaacacttgtcgtatttgtaacctcagttttaactgtaatgtttccatcaatgtccctcttacctggtacaggggctcttcatattcttggattacaaatctgtgaatgcaaccatgcatcaaaaatattcagaaaaacaatgaatgcctacctctgtactgatgatttataggtgtttttcttgtcattattccctaaacagtacaatgtaataagtatttatatagcatttacattgtattaagtattataagtaatctagagatgttttaaagtatataggaggatgtgtgtaggttgtatggaaatagtatgtcattttatatgtcacttgaacatttgtggatttgctatccgtggggatcctggaaccaatcccccatggatactgagggacaattgtattataagcagcaagagggaaaggaatctgtctattttgcccaaaatcgtgttcccgggacctagcatagctcctggcaaagagtatacaacaaatatgcattgaggagagaacagagggaaccattatccccttattctcgctgttccttcatgtaatgaataaacagtcaaatcttacaagagattttaaaccagtcagagaaaagttggaagttagttagttgttcatacattgagaagcctcgacgctgtgtcatctaggtaatgaaagatctagggaagtttagcagggagaagaagagagatgatagttgtcttcaaatgtttgaaggactgttacggacacaaaaatttaaacttgtgctgaataattccaagaggtacacagtctctcgatagaagctaaagtggggggtgacatttgactcaacaaaaagccatctaaatatcagaactttcaaaagcaggaactggtgcctcaattaatagtgtgttttctagcacttatgatacctgatcataggcaagataatgaaaaattgggacctgggagttatacatgggaatttgtttatcagttgggtgattaggagaggtggccttaaagtcctgttgtgttctaagagtctgtgattctgagtcttatttcccaacaagagaggtacagagcagaagatgggattgggagaaataggataaagataccaggaaatcctaaaggtaagaaaaggaaggcagacctgaagctaactctatacttcaggtgcttgcctagagccagccctacctacttagagaatgttgaagagccagttaaaacatctttaacacggatgtaaaacaaaactatcaaaacctgaagatttcgaatgttctaacctactcgtcagttgggcttttttcacaaatacttcagtaaataggcataaatttattttttaatgatagaaaatatctcttaaagaacttataactgtggataaaagcaccaccataaaaatcttgtggtgaaatatatatatatatatatatatatatatatatataaaattttaaatatggttagctagaatatgacgacaatgtttatgaaacacagagactcttgacaagtcccatgtatacactataaaactttaagttatccactattcactcactaagcttatacttaatgagtgtctgctgtgtcacttattgcggaaggcacaggcggtatagcattgcacaaaacatatgtggtctctgatggagtttttcagtctagtggtgaaagcagtgaatgggtgtacagatgttaaataattgtacaattagttgcatgtgtaaacgtcaaagttcagaagatgacaattgatctacggcaatgtttctcaatctctgacgttttgagccaaatacatctttgttgtggtggactgccctgtccactataggatgtttggcatcacaactgacctctgcccattagatgccaatagtactctcttctttaatcacaaatttgtcccagacatttccaaatgtcccttggggagcaaaatcatccctagttgaaaatcactggtctagggggaggtctttatgaggaagtaacatctaagaaagctggtatgtttacatatagctacagtctattacacatgtatacatatgtaacaagcctgcatgttgtgcacatgtaccctagaacttaaagtataataaaaaaaatgtaacaaaacaatacagtatgataagtgctatgggaccaaagatgaaagggttctactgcacagttatgaactcatagttaggcttttggggtcaaaattttgctgaagatatttgccacccacgtgacctttggcaggtgacttagcttattcatgcctcagttttatccaatgtgaaatggggctggaaagtcccatgtacttcctaataactttgcggaaataatatgtggttatataggaaaaaaaaaaaaatcctagaagtatgcctgctgcgtagtaaaaggaaggagaaggataaagagaaatctgcattttttcttctgtaatggggcagatagtaaatattttaagttttgtggcccaaatagtctctgtcacatttacttgattctgcagttgtggcattggaagcagctatggacaatacttaaattagtaggtgtgcctgtgctttcaataaaattttataaatacaaagtttgcaaaacaaagttgttttttttttttttgtagtttgctgacaccctagtaaagaagcaccattgtcaacgttaaaaattatcaaatttttatttttcaaagttttcaaatttgctttgcttggtctagctcatgaaataagtcaaaagtagcaagacctccacctctaaaataataatagtaatgataacctcaaaaggaaagaagaaatatttttaaagaagaaaaattattgttaaataggattattgtgcagagaaaacctaggagactcaattttaaaatctgtgaaataattttaaaaatactttatgaatagatacataatagcttttattcatattaatgactataaatgcaaatggaaatatttcattcacactgatgacaatgtataaattaaggaggaataaaaattgtagaccctataggtgaaaagcataaaaatatacataagaaaaagcaaaaattgactacgtaggattgttttaggatttaagatttattgtcattaaacttgcaataccagccaagttaacatttgaatttaatacagttataatcagaatgcttttgatgtgtttgggggcaatataatttcaaaggaaataggcaatgatgtaatttaaagtttatatagaaggaaattgtgtgcgtgtatgtgtgtgtataaattggaaacaattttattaataagcatattatggcagcaacatacacttccagatttctactatactttgaagtaattgtgatcaaaaccacagtgtgctggcataaggctagagaaatgggttagtggtttacaagtgagagtccaggaaaacatccaaataagattggatattttagttctgtgtggatagcctatttcacttaataaatagtgtctcgtaattgactattcatgtacctataagtttaactatagaccaaaaaaacgccctactagattaaggagctaactagaaatataaattcatataaacaataaaggaaagtgtaggactttataagcttcatgggagacagatttttggtaagtcaggaagcctggaagacttaaaacataaaattggcagactgaattaactgatagtttaaagcttccatagagcaaaataaatcataaaccaagttttaaaatatataatggatttagagaaggtatttacaaaaatatatgactaatggaggttaataataacaatatgtaagaaggatatgaaatggcattttactataaaggtcaaacaaatgacctataagcataataaatcatattaatctccactagtaataactacacacatctacataatatagatgttacgcctgcatttgatttactttatctgtcttttggcagaactatttgtcaccagataaaaaattctatatcattaccagaaaggtatattattataatgtttattatgttgcagttgtaaaagaaataacagcttttcaattgtttacaaatcctatagaacatttactgaaatacatttacattttgtggcaaacttggatttaaataccgtgttcgtgctttgttttatgccgttttcccatcttttctccaggaatttgattgtgcttcattgaaagctaaaaagaaaaaaaaaataattctggttttggtttaaaaaattaggttaggggttaaaaagttgtacgttgtcttctgtaaaaataaaaaacaagttttctttgtttcttggaggctttatattaaatggatttttaattcatagacagcatattgtgatgaaatttccccatgagcttcacattttgtttcaatagcagaaactaacttggttgcagttactgcccttctgagaacagtgttctggaataattttgacatacatatgtatctctttttaaaacatgtgttaatcttttcataaagaaagttttcccagctgtgtcacctgtgactccaactttctggggggacagggatatgagatgttggaagggaatggcttgaagaaataaagtgcaaaagacgtaatgctttcctgtggtagaaatgtattcagtgaccctgaatgaccttcctactcttgtcccttcatttttcccacaagtatggtctgggcaattataaaaattgacatttgcagtgggctcttctgtaaaagatgctcaatcagaaatgatttattttagaaaaagagatgatataaacatatatatcccctgtctcggaagtgtgaaggttgaaaagcaaggagatgatcttcaaagtgtctaaaatattgatttgtaacatcgttttatgaaagtgcttcagattattttttttcttggatggccccttatgctttggtcagttgatgctaaaatctgaacttctttattttaaaaaaaacttttaattttgaaaaaggaagttcacggtgctgtctaattctttttagatagtcattaatgtaaatgtaagagtcattctgagaaccacatctgctgatatgttccgttaaattacaagttctatgtgtatttgctttgctttcatacaatgaatcttctttactctcttccccacctgccagaaattgccccactcaacgttcataaaaggtccattttcaatcgctatatttatttcagaagcagagatatcatatattcaaattttagttactttccaatatcaagctaataactcacacaaataaatcaaactacagcaaaacagcaatctagcattcaacaaaacctccccaatgcacatatttcaagctgtagatatgtatcatccaccatgctgaaataatgtacatgttcaaatcaaatggaaaactagaatcaaaattgttgattacttcttatcagggcattttattatatttaagaaaaatacaaattaaatcattttcaggaagcaatccttctggctaagatttttttagcataatgcttaaagttaattgttgatctttatctataaattcaaaggtggactaaaaatgcagaatcaatcaggtagtccattttgcatcaggtgaaatatataaagcataaaacagcgagttacatttcctaacaaaattgaattacagtgagtaaaagtgacaggacaaatgcattaagaaaagatggactgaaatggatagagtagaatatatgcatctataaaacacagtcatatataatacactcattttttttcttacgagtgtgagattaatggaagaaaacaacaataataacaaaaccagtgtgatgtgtcagatttcaccttttaattaaaaaattattcacttcagaggggaattttctttcttgggttagctcaatcatgtcagatcttgttcatttaaaaggtcagtttacttgccttctgaggtttttgtttgggaaaaagaaaagaaaatagattttcattggtatcctgggtagaattaattgtttatcattcatttttaagatctccgagaggcagaaaaaggggaactgtgcaacccttttgtccttctggatctcaaaatgaagggatacattctgctacatgaaatgtggaattaagaccatgatgcaacatgataaacaacacaaatttgggggtgtctctgtgctatacattattgaatttttccatgctatacactttttggatgtgtctgtgctatttattcagtttttttaaataaaagtttttgtagactaaattgccctctctactttgcatcgtttttgaacaaaggattttcaagactgataagctcaaatgtatcatttattgtattcaagtagcattcaatttttctttagaagtataatttgtagatattttaacacagaaaacttgcaacactgctcatgataggcacttattatatattttttgaaagactatatggataatgattctaactttgacttttcctgttttgccttcactttagaattaagcagagaatcaaatccatattcctgggggcgatgcttggacaacagtatctctttaaagatctttgtgtgagtcgaaggtgcagccagactgggagttattgtgaagaaacagattcaggaaggttgagaaacttgcctaaggctaatcagatagttactggcaatgttgtttctaaatcactgtttggctccctcattcaatgaatctacactatgtgggactgcctcttgctcctgacatcttttgctgctgaaataaatgaactcaaagcctagaaggtagaaaagagggagttcagaattatattcaggcacaaataccaataaggctattgcccccagaactgcaacttctcttggtttaacagataactatttagctgtgaggtacaactgaggaagtggacacacaagttatcaggagattctgatgtgccagtttatatttcttgtcacaggtaatgattcgaaatttcttaaaacagctgtcctcacagtggagtaacctgggagtacatgaaggcattccaaggagtaggcacagatagttttaagggaatttatttctagatcttctactttattttgtactcttcctgaaaactgaattgcctgaaaaaaaaaaaaaaaaaaaaaagacatctgtagtcaagacctcaggctgtttctcctttctaaccacttgccttttctaaccacttctcccaatttaagaaaaaaagccttatatttcatccaactctgatcttactaaggcttcaaacaaaagaagcatgaatgactttcatgacagggcaacatagctttttgcaagaagagtggttgctaactctttgctttcaactgaacccgaagagaagacctgataagttgtcagccgatagatcattaaaaatacgttttggtaagcaatcatcatgtacttttagcatatgccatagcaggagcacaaatgattaagcaatgctactataatacaattccttccgtttctttctactcacctatttgaataagatttttcatcatttacatctatacagacaaaaattagggatagaattgatgctgaagcctttccaattgtagaattaatttatattcttctgaaggtgtataaattgttaaatacccatccatcttattaagagatgtattttcaataaaattttatttttatgtttatcaaattttataatatacatatattgttttggtcaattgcacgttaataattgtaacaatacctcaattgaaaaggtttgttttttacatttaggacttacagtaacagaaaaaaaacactcattgtgtatacatactgtttaagaaaagtatactaggtgatcaataagattttttcaggcataaacatatatcttagttttaagatatcgatatttacaatgtccctcaaattatattattttcagtcatttaagaatgaaaagtacatttcgaatgcggattttaaatctgcaagggttgactcatttttcaagagtctttttaggggatacagaagcaagaatgtttggagttccctgatcagtatctttaagagaaggtatttgttggtagttcctagcaaattccaacagcctgatgctacttaaaagataatagtaattattttaaataatgcttctgataaaaaacattcatgcacactcagtttaaaaagatatttaaacatttgtagttgtagtttgggaactcatgatacaagtacagtctgtaaatgaagctcttagtttgcaaatatcagagataagctattaaaatgcagaaattgaaattgccctgatatatgcataaattagtgtcatctccatcttgtcagttagagtattttttagattctctctatgtatacatacatatatatatatatatatttatatatatatatatatttgtgtagctgtgcatgtgtgtatttggactaatgggtcaaaggacagtactaacccaattcaataattaaagaaaacataattttgagaattagctttatggtaattgtttgacttaaatgagtagatcagagaagaataagggctttcccttatttaaacaagcttcatttttttatccaaacatttacttagctgattaagcttcacttgtttattttcttcaaagcattcattcaggtgggtactgagtaaactgaaatatcacaccagggaacttcaacaccatccaagtcttaaaggcttcacttgttcacagttggcatttagtgaatgtctaggctactgataatattgtgagtaagttggcagggatcataagaaatgataaaatacagttcttgaaaatgttatggtttgaggaaaagatctatgtttggaattagactgacttggattcaaactctggctgtacctttgggacaaggtgttcagaaactctagcctatgttttttttctgcaaaatgatcctcttttccaggattcctgtagagattcaaagatatgtgaatgtttagaaaaagaatagacttttgatcattgttaattcccttactttccccaattagacttgtaagactgggaagaaagctacacaaaagattgaacaaattatagctgacagaccatagcaaaagatacagggcaaaacttaaaggggaaaactacacattaaattattttaaaccattaaatagcactaacttttgtcagatattacaaccaaacaccactcaaattaaagtaaactgaataaaatgcctgtttttttctgtttactgatgttttcatttgcttcattcatttattggaagatataaaatgtgttagacactgttaggtgctgagtgtataaaaaaatcttattaatacaatttaaacacgcacacacatatatatggttataacaattgatgccatgtatgtactgtttatatgcctatacattattccacagacctggggggagggggatgtagagtcttaccagaaccataggaatcttctcacatcaacatttccttttgaagtttgttcatgaggcaccatccagataatactaccatctgcaatgtggcttgagaagatgttagatttttttattacacataataaggctgtaaagtatttctgtatttaggtagaggtatgtaatacaatatgtatataaaattacatatccaataaaatctggtgttaaataaggactagcttctatgataatatagtctaaaggcttttcatttggtgttatagaaattatgtgaaatatgtttcctggagtagaattattcgcatttcagctctctgacagtggaagaaaagctagagggagaggtgaacaagagagggagcataatggacaaagctttgctggaagccaaaccaccacttcatatgtcaaatctgacaggcctcccattttaggtgtgctgtcattgaagctttcagctgcaccttgcctgtggctaggctattttcaaagattaaaatgcgaaactggaaattaaatgcaacttaattcccaatttaaatttccattatttttgaaaagtaaaagattaaaagaaatgtataattgcaattctggtggaagaggtaattataggaaaggtgggatgtatttcaagtgggggatatagcttactgcagcagagaggaatctaagctatcattcttttgaaattggtctggaaatatgttttcacatggaaaatatactatatttttaggaatttccttgtcatattactgtatccttttctgttagaatataaattctgaattccctattccactgtagatctgcctccgattatattagctcttctgaagttatcaaaaaataatgagatatacaatattccatatatgtcaaagcaattatttttaggttaagtaataaaccaatgacctttaacccggtaatattctgggttgttcataaaaaaactatattcaggtaataatgtctttccacttaagcaactgaaaaaatacacaatacttaacatttggttaattaaatacctactccagacaaaaggattttctgttttcaagttatcttagcaagctgagcaggaagcaatgatatatccaatcagaatatccatggaagctctgctacagtttcaaaaagttctcatcaggcagcttttaaaatgcctactctgaaaatggtccaggttaaagaacaacagcttcctcgtcagatagcagtattgcttggccatgtttcttcctagcacaaaaaagtacctgctcttctctgagtacctacattctaaggactatggcttacataaaacagcatgggttggggcaatttccagcacactgctcactctcgaaaacgtatgatgcaggtgagagtaatgtttttgtttgaatctgctttcactcgtggaagatgaaactacttgcaaagatctgtactttagctattatgagtaacaaaagactcctaaaatattgcacacattgtggggatggagaaccatcatcctgggatttgatggatcctatggtttggctttgtgtccccacccaaatctcattttgaattgtaatccccacaatccccacatgtcaagggagagagaccaggtggaggtaactgaatcatgggagcaatttctcccatgctgttctcctgatagtgagtgagttctcacaagatctgattgttttataaggggctcttcctgcttcactgggcacttcttcctgccacctgtgaagaaggtggcttgctccttctcaccttatgccacgatggtaagtttcctgaggcctccccagccatgctgaactgtgtgtcaattaaacctctttcttttataaattacccagtctcaggcagttctttatagcagtatgaaaatggactaatagagacgtgtctctcagaagtcacagtgatgcttgaacggatccagagctccttcttcaggaaggtcccaactcattctgaagggtctctccaagcccacctctctctgtaaatgggaaaggttttactttgagcactaaaacctgccagaattctcaattttcctaacagtgtgttaataaacacctactcatttagtatccaaaccaggtctgtatttctcaattagagctcaccaggctttcatcataaagtagagcttcaaattgtctgcaatcccactcctatcaaaaacctagaaggaggtaatatttcagagtaatactataaccagatgaccacatctaagaaactgctgaccctacgatgtaaccttctgtccatttttccctttggaaagtctaggatcttttcttataccagcaagttacaagcctggactacactaacttgctttccgcagaagaaaacaccatgagttctgttttcatattaagcacttagtctccatcagacatcaatcgagaaaaaatcattaaaaatcacattttatatttgatgtatatttctcaataatcctatgtattagttcattttcctactgctatgaagaaatacccaagactgggtaatttataagtaaaaagaggcttaatggactcacagtctcacatgactagggaggcctcacaatcatggtggaaggtgaaggggtagcaaaggcatggcttacatggtggcaggcaagagcgtgtgcaggaaaattgccctttataaaaccatcagatctcctgagacttattcactgccataaggacagcacaagtatttagctccctcagcacagaaccatccccgtgattcaattacctcccaccaggtcactcccatgacacatggggattatgggagctacaattcaagatgagatttggatggggacacagccaaaccatatcatcctatttggatgatcaatattatcaaggtatgctcccctgagggggcgtcctttttaccatttaactccaggacaaaagtttatttctttgtaaggacagtgtttatttcttatggtcctattttctcctaagatccagacaccaaaatggccatctatcattgacttaactcctgaattttgcttagagtaacagatttagtgaatctaaatattttctggctgtggaatgttaatttatacatgttcaagttacctttgattcatgtgacagtttgtgccaaaacacactcattatcagaactcagatcattatgttggctcttgttttcgttactaaaggaagaaaaacagtttctcaaaaagaaaattctgatacctaggaagaccattatacctcactcttttctttatctcatcaccacatccaatattataaaagaacttacaaagtaaaaagaaaggtgttctgtagatgtagcgcctggcttgtatggtagcttaaatgaacacagctaaaaatattttatggctagtgtccaaaacagtctggcaccagacaaaataagaatatttaaaattatattttagagttactttaagaggaagggagagagagatgtaggcaggaggaggaggagcaggaggagagggagagagagagagagagagagagagagagagagagagagagaatctggggtttctatggaagggctaagaatatgtagaaaacagtttacaaagaaatatggtccaagaatcgtgtgtacacacacacacacacacacacacacacacacaccccctggaatatttttcagccttaaaaagaagaagatctgtcatttgtcccaacatggatggacctggaggaccttatgctaaatgaaataagccagaccaagaaagaaaaatattgtatgatctcacttatatatggaatctttttttaaaaaaggtcaaatatatacagatagtgaattaaacagtggttaccagggtcagggtagttgtgaggaaatggggcaatgtaggtcataggatacaaatgattaaaatatattaatatattaaaagatataatatacatcatgaggactacagttaataatagtgtgtattcaagatttttgataaatgaatagattatagctgttcttgccacagagtgaaaaatgggtaactgtgaaatgatagatatgataatgttctccacaatggtaactattttacactatatatataaatatctatgcatcttacaccattatgtggtatcccttaaatatatacaataaaatttattttacaaacacatattaggaatgcatattctgatttttaacaatagttaacctcattaatatatttcacactatcatttctagtgtacatgaaaagtagtttattgacattagttgtaaaaaaaaaaaaaatggtcttgagacttttgggtcagagaatgttctggccataaggtaggtttctgcttgcctactagatatcttaacttcgatttcctgaacatcccatcacttcagaatctctcaatcctttctaacatccgcaacattgtttttctttctgcatttcttatattgactgatggatttataattcactttctctgaaaaaccctgcagttatcatatatccctatccattctggctctttattgcccaaatctctaccaaaatcctgtcagcacagcctctgaaatatttctcaaagcatttataatctggctctcatcaacattttcaacactctgttttatcattccactattttacatcatttcattttcatttttaccacaatcactcatccaacaaataagtatttagctccctcagtaattagtattattattattaattataactagatgctgagcatacagaagtgaacatgacagacataatcccagcagggatgtcagactttatgcaagtaatcaaccatgatgaatctcatgagattctgagagagagagagagagattgagagagagagagaaaggggaaccactggtgtccgagttagaaatttgaattagtatctgggtcaccaaaagcttctgtgaagaagtgatatagacttggccacacaaaactaccgtgaaggtggtggaaatttttctatgcagagtaccacatttaaagagctaagcctgagagtgtcagagataaaggaacagaaagaatgtgacagcagattatgtttggaagaaagatgttcaagagaccaagctaaagaggagatggggctagaacctggagggtccttcgggtcctgttgggagttttttctctgcccagaagggctttgtcacgtggttgtcaggaaagagtcatgattagagctttgattcagagacttctttcgctgaagtgtggagaatggttcagagagaagcaaatctgaatggacaaaagaggttattattgtaatcttggcaagaagcgatggtggtcttgactaaaatagttctagtgagaatgtgacaacaaacctgagaaaaatacaggagacgtaattgacgggggttagtgttaagttgaacgattgcagagttgaatttgaggaaagtgtcatatatcattcccagtttctgatgtcatacacctctggagataacactgccatttcttttgaaatgggaaaataataagtgatcagtaagtacgtattggataaaataatgaatggttaaatgcataaggggagaggaaaagagttgcagagaaagagagtaaacgtattttggatgtgttaattttgagatacctttgaaaaatccaagtgaggggttgggtagtcagagaaatgaatgtggatgtcaggacgaaaggtgaccgtgatgaactgtatgtcttcctctaagcacgttatacagcttcatgtcacaagtgactcacttcatgtcacaagtgactcacaaggtcacttgtgacaagcatttgcctggtgcttcatccctaacctccctttctatactcagctaaaatgtcacctacaatacttcttccttgactccaccgtccccactttactgatatgaatacattttaataaaatgatataataatgcttagtttgtaaacctaatgttcctcaagtggtataattatctgatttgtatgtgatcatcaacccaaccatattaggagcaccttgaaggtagaagatttaggttcatgcttaacaccacatctggaccactgtggatttaactttctacaatgattgtattcattaatatattgggtgcccactatattccaagtaatatcctgcacactacgtacaaggaagcataggtcccgtgtgctcatgaaactgtaattttagtaagcagggataggatacaaactgagaaaggaaaacaatttagaaagtgggaaatattatgcacagaattaataaaaaagagaaaaatcttgaaaaagtcttcaatacctcacttggaaggtgattttgaagaagaactgatggacaaactagagtcagccatgtaatgatgtaggggcaaagcattccgggcacaagggacagcttatgcaaagaccttaaaaatgaactagctttgtatgttggagaaggataaagagaactaaggtatctataaggtaattaggaagaggatgagttatttagtcccttagtctttgaagcacattatctcatacttcaattgagtttattcttagtgtcattcttctggatgcaatatttgagataaatgtcttaatgaacgttcacctccctccgtagtaatgcctgagtgtcacaaaaactttttttgtttacatacgtagccatctaatggaaacataaaataggaatcaaaagttgagtttcatgtacaaaaggtaaggactgtacatgtggtcataacaacttcaaaagcacctgaaggtaacctttaaggaagatacaaaggctaggaaatatctaggatccatgaagacagacttacttaaggtcatagtgtgtccagagttggttcccgccggtgggttcgtggtctcgctgacttcaagaacgaagccacggacctctgcggtgactgttacagctcttaaaggtggcacgaacccaaacagcgagcagcagcaagatttattgtgaagagcaaaagaacaaagcttccacaacgtggaaggggacccaagcaggttgccgctgctggcttgggtggccagcttttattcccttactgtcccctcccatgttccatttctgtcctatcagagtgcccttttttcaatcctccccacgattggctacttttagaatcctactgattggtgcattttacagagcgctgattggtgcgttttacaatcctcttgtaagacgggaaggttcctgattggtgcgttttacaatcctcttgtaagacagaaaagttccccaagtccccactcgacccagaaagtccagctggcctcacctctcaatagcattaagaatatagtttcacgagcatatatgaatcaaaacttacatttgccaattttatttgcttgtttatgtgtttccaacatgtcttgtcttagggccaaatgtttccctagagaataactattccaactatcttagttgctgtatttttatgcaaccttcaactctccatactaaaatgtctccagaatagaaaataaatcttttcaaagtttcaaaagaggctctctatatattccccttaaaagtaccaggcagacatatttctaggtttctaacattgcgtgttgccaggaagtatatccaaaccatcacaagttattcatgtaaccaagcacacttattggagtgcttctgcttctgttcttgcttgaaattggaagctccttccaggaaaaaaaaaaaatatctatagaaggggaaaaaagtaattttactttgaaaataaaatatacgtgagcaatagttttattctgtttttaatttaccatagcttccaaagacaacattgttttatagtaggggttagcaagtgttttctgtaatgtaaacgtaaagggccagagagtaaatattttaggctttgttttctatactctgttgcaactattcaactctgctgttagaatgttgaagcagtcatagacaatagagaaatgaagatgtgtcattgtgatccaataaaactttatttacaaaaatggcaatgggctagttacggcttgagggctgcagtttgcagactctcacttcagagctaacagttgttgtcaggagtcacttgtttttggaaacctacaatgaggtactataacaccaaaaagagttatcccttcctttttctctctcactttttgaattatgagaagaattagaaatgtagttaatgataatgtccaaccagtgtaattatacttgttagaaacacagctggaagcctgttgtccagtcttatttctcctctgtgatcctcattttcagaggttgaagtcataagtttgccatgtctactttctgacaggggaattataataatgtggagtcaccttttgtttgtgactttgacaatgcttcattgacttactcaccaattttctaatttttatgaagactttttgccgaaatgtagactcagtcttctctcttgtctactctttctataacaattaacaatgaacttatttacctttttaacatctttttaaaaattttctatacaccttgaaaatgtgaatacaaagtaatgctgcatcatgtatattgccttattcacacatagcctcttatggtatatcatataaaaatggaacaatacagcaacaggttgaatgaacagtaatcaggtaacaggaaaatgagatgtctttaatatttcacttaaaaactcaatttcctaaagcatacatataaatatttggaagtatagttagaagaaaaatatctttaaaatattttaattgattagtcttatttataagataatttttaggaggctggttgcggtggctcacacctgtaatcccagcactttgggaggccgaggtgggcagatcatgaggtcaggaaatcgagaccatcctggctaacacggtgaaactccgtctctactaaaaatacaaaaattagccgtgcatggcagcgcatgcctgtaatcccagctactcgggaggctgaggcaggagaatcacttgaacctgggaggcggaggttgcagtgagccgagatcgcgccactgcactccagcctggtgacagagctagactccgtctcaataataatcataatcataataataatttttaggaagcatcagaaatatataagaaaaagattattttcttaattgctttactaaaaacacctctatgatttttcagtaaaacttgattcttatgtcatgtgtgagtgtgatctgcctctcttgggatactactgtactcatgaggagtgatttttttctccaacgacctctttgtcacgtcaacaggtcacaggaatagtgtaccctaaaaagccacctgccacatgctgctgaaaatgtaaaagtacacacatacacacacacacacacacacacacacacacacacacacaccaaaatcaggtatcacaagctgaaaataaaattgagtccaatttttttttaattgagcagttaatgtccttaaaacaaaatcctatactgcaacaaatacttagccagatcattctgatacctccaaactgtggtgtattccaagatacctctatgatctttgatttgatccacagcttttcagttatcatgcaaataccttcaagttttatctcatttctcagtgcaaactcattaaaaattttcagctgaattcaattttataaacatgttgtgaatgtcctctttatataagcaaggttgtaaggaactggccacataaacagaaaattgaataacatatggtttctggccttagtgatctcatgtgtgagttaggcatatgggcaaaatcagaacactatagagtataagtctaaaatggtagtattttataatagaggatgaagagggtgctgtgggatcataggtgacagatataactcccgttgtgggacttgagaaaggcttcacagtctggaaacatttagttgctattgaacacaaaataagactcactgttgagagaagggagagggagggcatttcaatcaaattaagattctgtggcatattcggaaactgatgtttttaaaaagagtaatgtttattacattcctctacataaattatatttctatgtaatatgaatgacaaatatttaacacaaaatgccttataacatttgaatgaaatccatcatatgacctgttatctatttccatttcctttttgctcatatcattatgaacaatgacctgataaattttttataagactttgctgaattagtaaaggattattaagtttagaatgaacaaagctgaccaatcattcaggcaaatttgaccgttttgttgtcgcttttcttatttctgaaaccatacaattccctgaaatgaataagtacatatttgataacttcctaaattaaggctcaaaacactggtaatctactgggctttcatttgttccttctatttgtctaatcctatctatatttctttatatgagctatgaaaatattagatttattaagttgtcctttatcttaatagagaagaatgtttttctatgacattaagaggaatttgatttttttctttaatgatctacttttaattttggtagagtagcattgataagatcaatattacacattgttaagtatgcattacatgttgataagataaatattacacttaaaatatgtttatcaaatgtatgaatgataaaaacgaattctgaaatgtatgggaaagatcttgaataaaggtctatgtacatttcaaggatgtctacatatgcaaattatcataatataataactattgaatatgattatcttcacatactttctttatttttcatctcttagatgaaattgggtattgttttcttatagctggaacaaagcattacagagaattcttagtgtgatttcattgaaactcactgttatatgagttcaacaaagtttaaattagtccatgacttaatcatcctttataaatcctatcactagtattcggtaaggacaaagtcaattaaaaaattagcaacagaagcattaaaagaaggattaataaatacaaaataagggatgtgatatctttacgtattgctgagatgttagtgctaaggaaaaacttccctgttcataatgtgaggtgggaaaaagaagaactattattgtatatttctcctctctaaaactgcctatctgactgtgtttttctgtgtcagccgtattaacagatgtttaattttactcactttagtatataaggcatcataatgtatgaactatttcaaaggccctatgatggctaattaaataaaaatatattaaatattagctggacaaaataaaatatgtattaattttggaaaaagtagatcaaggttttgcagatcttttcatatcaatatattcatttgctgaataagcttttattgtttaccaatattactagttttatagagatgtagatatcaccacagtatgactaattttatagggacacagatagatagatgttattttattccaatcttatttttacatataacaggtataaatatgcgcttgaaaggagtatatcacttaggagtcagtcagaaaagtaaagatcttctagtctaatacagtggttctcagccaggggtgattctgctgcacgctgagggataaattggcaatttctggagacatttttggttgtgacaattgcaggagtgttactggtattcatttggtagagacagagatattggtagacactgtacaggacacaggaaagtctcttacaacaaagaattattctgtccaaaatgtcagttgtggtgaggttgggaaacactggtctggaagaaggaatttactatgaggaactagttacgaaagtatagagacatttaacaagctgaacaaaggatagtgagatggctcagagattagcaactgtggcatgaagccactactacgtttaggtaaaaataagctaccatttattcttatagtaataataataataattattattattattatttgagatggagtttcgctctgttgcccgggttggagtacaatggtacaatctcgactcacttcaacctctgcctcccagattcaagcgattctcctgcctcagcctcctgaatagctgggattacaggtgtgcaccacccctcccagttaattttttgtatttttggtagaaacggggtttcaccatgttggtcaggctggtctcgaactcctgacctcagatgatccatccacctcagcctcccaaagtgctgggattacaggcatgagccaccacacctggcccactctttcttttttaattattgagaaatataaaaatatgtcaaaagtaacaggtgtggtggagttacagcatgcacataatgggatacagcccattatctaatctcagatggaaactagaaaaaaaagagaagatctttgctaaagcacagattatgtggaaaatcatttagaaaaatagcttatcacaacattaaaattaaatcctttagctgatcatttttccttgctattttttcttttaaaattgagaagacagtgagttttttttctttattgtcattatcttgatgtcaaaaaataatatgcacattataagtgggaaaaaagataagtcgaaatgaaatgaaacaatgcgaggaaaaaaatgtcacaacactcttcaattagaaaaaatgacccccatctttcctccaaatagaaatgacgtaactgaagtagtggaactttctcttccatggcaactctagagaaggggtagatggcatgggattgtggacagatggacacagaaagaggcctcatttattgttattgttaaaacttttacttctagtaatagtgacacctccttcagcatttctttatcaattgtcaatattttttggatcaccagcatcaccttctatatgtatgtctagaaacctcctgttatgaatttacacttctcagagtcaagacagaaatgctgtgaattgggcgataaataaaataccccccttttattgccttgctttgtctcttaaagaaagatgcctgttgggggactatgagaatgctttgtgcttctggacctcaagggacaaatctataataaaaattatgcatagtgatgagaaatatatataatgcaagtttgtagagatcagttaacttatcttgtctaggcaattatttctaaacaatgatttcaaatcattaactataatatagcccattcataccctccatttttgtcaaatccctgtcaccttcaaggacttggccatcccataggctgctctgcttttaatagaggaagatgctgtaactcttggtaccattgccagttatgaatttatccattaatgaacattgcatttaaggcataggtttatctccttctccaggtatgaacctgcaggattcctacctgaagcttaagggagaataaatccacctgggacaatcaaggacagatcaaccaatcagctcaaagcaggtgtgaattacacagtttatttgagtgacaaggtagctaaagcagggataataaaagaagggagtgggttgatgtggacagacgaactatggctttaggaaatttggtagggactgaaacatattttgtgtaatttatgtgggtctaatagcttttgaaacttgtttacaagacctgtgtaagtggtactggcatattcatgcatgagaaaacatcaagggaaaacttaatagttcaaggaggtgacaaagaagagaggaaccaattattttcactagccgtcaaaagcaagaaaataatcagcttgagcccttcggggaaaagataggttaaatattaagtaacagtttgttattattccaagtgttttcttaaagttgctcccatactttcctgttttctctgagggaatttagtttttttgttggtttttttttttttttttttataactgtcattggtcagagcttgatttgatgccagtcaaatttttttaaagagattatgaaaactgcttaaactcttccaaagggaagatgggtcattcttaacatgtgtttcaagaggaagagcataagagcattatatggtaaggctgaaagcagatatcagcgtttaggggccatgaagaggtagagctcacattggtaggatcattgactagaattccagagatcaaaattgtatgttagtctagcattggggaggacttgtagctagtatcttcattctagcttgggagcctaggaatcaggttaggcatcttgcacaggaatgggccgatgggctaaaatctccttgagagagatgattaatccaggacaaaccaagcagtcatgccaatgaattactttaacagggtacttcatatcctcatcctttgggcagcacggtcttcagagatggggcaggccccaggctgcagttgagattctataaactaaggtcaaaaagatgcagcagtgaagaagtcatgcttatcttgtataaatcatgttttcttttctttttaatgaaaatgtacatttaacacattttaaaactaaatattgaccctaaaattccaaccaaaaaatgctacataagtggtatttatttttgaatttccctcatgctcctcccactgtggggacaaggagtggtggtggaagagagatcttttagcaaacctgtgagtagagaattagaaggtaatgggaggaaggtaaaaggaaaacatcatagatggataggctcacaaacattaaaggccttcgtgcctgtccttcatgcctattcatccctctccagtatgtgaatcaatgtacttgttaaatattcattcacctcacatatttagcattaaccgtgtatcagggacgttgttagaccgttggtttacgatgatgtgtaaaatatcatttgtaactcagactaactggaagtgctcaatataataagatgtaatgttatggaacactaagtctgtgctgaagacttatctcctttaatcctaaaacaatcctggtgggtagtctcaatgatcatctccaagtcacagttgaggaaattaaggcttcaagaagttaagaaactggaccaacatcacaaaggtagcatcagagtgacagtttgatttcaaagtgtacttgacttcaaggcccacatttccttgcacgtttaatattgcctttctcaggtaaatataccattaaatgtgatacaactctaagcatttgaattacttacaacgtgcagagttaaaaccagcattatttacactatacttcagctcgtttataagtgaactattattttgtggactaacctatgaaatgtaaccacattgaattcctctgttaggtacaggtttggtgattccagggaatagagtatgactgaatgcacaggtaggggtgaagtgaacccggtcagaaaatttagagagcatcgagcagatcattaagcagctgtctttcaaatgtgcagaacacaactcatttgtaatctagggactatctgtattgattcttcccagggaagttacttatttttatacatatgtggtgtgttctgtccataataccattctacatggtaatgctcaactttattatttaaaaaaactgctaataatgaggtttttctttgtatcacagaagcagcaggagcaagttttctttttccttcccagtttttttaagtactgccaaggaatgtgattttgtcagacttgtatttcctattaagccaatctgcatgactgttccttctactagctttacctgttcactcatttattaattcatcaaatatttgtagagtgactattgtgtgccacatactaatataggcacaaggataaccaaaaacagacaaacgctgtcctttcaaggagctcatatagtaatgggaagttaggaaaggagaaaataaatatgtggtatttcaaatggaagtattaaagtgttaagaagaaaagagaaactaacaagatagggaaaaagtgacaggaacatgatgttttattttttatttatatatattttttgagacagggtctcattctgttgcctaagctggtgtgcagtgacgtgatcatggctcactgcagccttgacctccctgggctcagatgatcctcccacatcagcctcccaagtagccaggtctacaggcatgtaccacgatacccagctaacacgttttcttttcttatagagacagagtctcactgtgttgcccaggctgttcttgaactccggggctcaagcagtccacccacatctacctcctaaggtgctggaattacaggcatgaaccaccatgcccagccgaaattgatgttttatatatggcagtctgggcagacctctttgatgtgatatttgaacagaaatctcaagagagggagtgtattagcccgttttcataccgctagaaagaactgcccgagattgggtaatttataaaggaaagaggtttaattgactcacagttcaatatggctggggaggcctcaggaaacttaaaatcatggcagaaaatgaaggggaagcgaggcaccttcttcacaaggtggcaggaaggagaagtactgaggaaagggggaagagacccttataaaaccatcagattttgggagaattcactcactatcatgagaacagcatgggggaagccaaccccatgattcaattacctccacatagcctctcctttgacacctggggattatggggattataaggattacaattcaagatgagatttgggtggggacacaaagcccaaacatatcattttgctcctggcccctcccaaatctcatgtccctttcacatttcaaaaccaatcatgccttgacaacagtactccaaagtattaattcatttcagcattaacccaaaagtccaagtccaaagtctcatctgagacaaggcaagtctgttctgcctgtgagcctgtaaaatcaaaagcaagttagttacttcctagataaaatggaagcacaggcactgggtaaatatacccattacaaatgggagaaattagccaaaatgaaggggctacaggccccaagccagtccaaaatctatcagggcagtcaaatcttacagctctgaagttgtctcctttgactccatttctcacatccaggtaacactgatgcaagaggtgggttcccatggtcttggtaagctccacccctgtgggtttgcagggtagagcccctctcctggctgcttttacaggctggcattgagtgtctgcagcttttccaggcacgtggtgcaagctgttgatcgctctaccattgtggggtctggtggacagtggccctcttctcatagctccgctaggcagtgccccagtggggactctgtgttggggctccaaccccacatttcccttccacactgtcctagccgaggttctccatgaggtcttcattcctgcagcagacttctgcctggacatccaggagtttccatacatcctctgaaatctaggcagaggttcccaaacttcaattcttgaattctgtgtatccacagactcaacaccacgtggcagttgccaaagcttgggacttgctccctctgaagcaatggtccgaactgtaccttggccccttttatccatggctggagtggctgggacacaaggcaccaagtcctgatgccgcacacagtggtggggttgggggggggacctggtccacgaaaccatttttgcctcctagacctctgggtctgtgatgggaggagccgcaatgaaggtctctgacttgccctggagacattttccccattgtcttgcctattaacattgggctccttgttaaatatgcaaatttctacagccagcctctccagaaaatgggtttttcttttctactgcattgtcaggttgcaaatttttcaaacttttatgctctgtgacctcttgaatgctttgctgcttagaaatttcttctgtcagataccttaaatcatctctcaagttcaaagttccacagatctctaggtcagggtcaaaatgatgccagtctctttgttagtcatagcaagaatgacctttactccagttaccaataagttcttcatctccatctgagaccacctctgcctggacttcagtgttcgtatcactatcagcattttggtcaaaaccattcaacaagtctctaggaagttccaaacttttccacattttcctgtcttcttctgagcctcctaactgttccaacccctgcctattacccagttctaaagttgcttccacattttcaagtatctttatagcagtacctcactacctcagtaccactggtcttaactcctgcgctcaagcgatctgcttgcctccacccctaaagtgctgaaattacagacatggtccattgtgccgagccaaaattgatattttatgtatgacactctgggcagacctctatgaggtgacatttgaacagaaatctcaaggaaggggagaaattatccatttacatatttggggaaagagcattccaggtagaagaaacagaaaatccgtagtcttgaggaatgccgtgtatatgcagtatttttcaaacttgttattttgaaatacatatacacttacaggaagttgcaaaagtattaagaaagatcatgagtacccttcactcatcttcagctaatggttacatcttacataattatatgtaatatcaaagccaggaaaccaggaaattgatgttgatacaatctatgctttattcagatctcacatcttacatagctatgcacaatataaaaaccaggaaattgatattaacacaatctatgccttattcagatctcaccagcttttacatgcacttatctgtgtctgtcattctatgcaattttataccatgtttagagtcatataacaactacccctattttgatacatggtactgaatagttccagcgtcacaaaggaactatctcaagccaccctttaattgtcacacccatccaatctcccattctacttcctgaatcactagcaacccctaatctgttctccatctctatgattttgtcttttcaagggagttttctaagtaaactcatttggggaaagaaaggagatgaattgttctagccacggagtggagaacagagagtaagagtacctattgaagcagagggagtcattgcaataattcaaatgagaaataatggtgattctaaaccaggaagctttcagtgaaaacaatgagaggtacatggattctgggtatttttggaaggtagcactaccaggtttgctgatgaatggggtatggggtgggaaagaaagagaagagcccaggatgagtccaaggtggataaggtgaatagaattgagaaaatggtagaaggatcaagttagatggtagaggggtaaaggtggaagcaataattttgttttggaattgttaggtttgaaatcttgttagacatcccagtaaagtcacaaagagtgcagttggatgaaagtatgggattcagggaagaagtatgtgctagagatgcagatttgagagtcatctgtgtggaggtattattcaaattcaagtccccttggaatgaatggctattcaggcagggtcttcataaaaatgcttgttgcatgcctgtaatcccagcactttgggagtctgaggtgggtggaacacttgaggtcaggagtttgagaccagcctgatcaacttggtgaacccccatctctactaaaaatacaaaaaaaaaaaaagttagctgggcgttgtggcacatgcctgtaatcccaggtacttgggaggctgaggcaggagaattgagccaagattgtgccattgcattccagcctgggcaacaagagcaaaactccgcctcaaaaaaaaaaaaaaaaaaaaaaaaaagcttgttgcttcaaattcatgtcagtctgtaaaattatctgggaaggcagtacaaaaactgtcactttgactacgatgtttctggtgacccatcttcattgatcagtatggaaaaggcatgtctctgaaaatctctgagagtctttgatacagcaagaacataaggataaatcattcttctatgttcatggttgtagaggatcttgaatgtttaatggcagaatagccagatcacactctggcacttctgtatgagaggctgagggatgttactgattcaccccgagaaatatttactactaaggggacagaggcaaaggggatacaagacttcaccctgagctgtagcgctccctccttccctatcctgctttcattcttcacattgttttccttctttcttttttattattatactttaagttctgggatacacgtgcagaatgtacaggtttgttacataggtatacatttgccacggtggtttgctgcacccatcaacccgtcatctaggttttaagccccacatgcattaggtatttgtcctaatgctctccctcaccttttccctgtgtccacattgttttctttctttttgaagcctctcattcactaggtttcaatcctgccttgctagtgttctaactctaaggcctaggcaagttatttcaccgaacttagcctcagtgtcctcatctgcaaaatggatagttttatgatatcttcagcccttaaagtcaatggttctgacagctagggtgtactatcttcttggatatcagtcatctcaagcaagccctccttttttggaccttcttttcacacacttcacataccttagagaacataatacacatcctctttactcagggcttattctttataacaggcttcctaattcaattaactcaacttttcaaaaatattagtgactactgtgatgtaaataaatttgcattttataggggtcttagtaacccagaagggagtggggaaaattaatatatattgagagtttattaagtgctaggtactgtaaatattttcttgtatttaatcctccgagtaattctacaacaaagatattatcattgctattatgtaaataaaagaacaaagtagaaagaaacccacggtcttgtataagctcccctagttggtgggtattgaagggagtatttcaatctttggtagcttctgagtttttgttctctcagggaatctgccagatgtccagggcacctgccaaaccctatgaggctataagaaaaccattaagggtcttagattacccagctttttgggagttagaattctgaatgaaatttagtgttcctgcagctacaaaggaattgagttagggaagtgatgactttatctttagctacattggttattttccttataataatcctggcttggtagattagaggcagcccgagtaacccagaatcgctaaaatagaagtgcgagctcattgcccgctgtccttcactatgtttgcatataggaagcaagaataaaacaagcataaaataggctaactagcttgtcagagctcttcacaccaagtctttgtgagttccaataagacactgactattattaaaaagacagagactccacataagtaggaatttattgttttccttttcagtcaccaaaggacaatcctctgcataggttagcaaaaaatggtactgatcctataatctctaatattaaagtttagatttggcaagctgtacatcttatgttgttcattaacaaaaaacaatattgattggtatcttgtactataacttgtactgtgggtcaaattccaatacagcaaataccattgcaataacaattctacaaaactacatcaaaaaaacctttcatgtttgagccaacagcctgatagtgctaaggactttgagtacagtatgctagaagattcttaacagttatttgtcctggacaacaaaggttgactccattaaaaacatagccatcagtgtgggattatttccaaatcaagcttttggaaaagtcaaatgaaagtttgcaagcaggtggggcatggtggttcatgcctgtaatctcagcactttgggatgctgaggcaggcggatcacctgaggtcaggagttcgagaccagcctggccaacgtggtaaaacccccatctctactaaaaatacaaaaattagctggcttttgtggtgcatgcttgtaatcccagctactcaggagcctgaggcacgagaatcacttgaactcgggaggcagaggttgcagtgagccgggatcatgccactgcactccagcccacatgacagagtgagaccctgtcttcaaaaaagcaaaaaacaaacacgcaaacaaaaaaaaaaaaaaccaaagttggaatgcaataaatgttcattgaatgaatactgaatagggagtttcagctaatccactcaaaatagtgctgaatttccagctctaaggtcaatgcttggcatatatatcctgaaggaatgaatggacacagagtaattttttttctaaaatgcaaattcaattatgtcacttcccttcttaaaatccttcagtagcttcccgtagcctccagcatattattttgaatagtgcttctcaaactttgatgtgcatcagaatcacctggggattttcttaattaactgatgctgattcagtaggtctggggtattgtctgagattctgcatttctagcaagtgctcagggttatagcaatgattttggcctgcagaccatactttgggtagcaaagacataagccacttaacttgacataaaagactgtttagacccttagtttctctctcgctctttccccattttgagcttttgctccggttcatgtttttccctgaaaataccgtgatcttacattgtctgtctggatgctgaattttccctaattctgggcctccatgtagttttaggtttgacatcacaaccaccaaaagatttccccttctcccttaatcttggttaatgtcactctcatgtattatactgttaatgaagcattgaggacataaaacttatcaaatattttatcacaatcaatgatggcaccagtgataacatccaaatgcctgggtgagtaaataagaggagaataggggacttgttgttaaactaagtttgcagagaaaaaatgtactgattataattaaattggatgtttatttgttatgacaaaaaaggagctagagtcttttaatccaccccttggcaccactgcttatctccttgtaacatacgtttgattcccatgtctatttcttccatatgggaaatttcagctccctaaacatcaccaatacaacctgttgataagacaaagttaaatttattgcttactatggtaagaaagaccacagcctggacaaagctttggtagtatttcataaggagaaaggtgaggttggatttcattgggagtatgaagcttggtttaagattggtctttcactgtgggggcacaattaggattgggtaaggatcatggtattacaacttagtttggtggaaacagcacagtgaagatttctagccaagaggctcagagactattaaggtgtgaactctattgatgttttttgttgaagagttgatgggagtttggggaagttactttagtgaacagtcaaattatttgcctggccaagagttatctgtaataggaaagttatgctaatgaagacaatggaaaggtaaaccatgttaatgtcgacagccagctatgtgagcataaggggtaggtagctttggtcctccatgtccaaactgtttgtagtggtaagtgatcttcattctcacatagattgaaagcttcctgaggacagggcaatgtctttgtaaactttaaaatatctatgtcctgcacatcacctgccgtagacaagcatctagtaattgacggttgggtagatactgagggaaaacatgcaccaaataaaaatggcaataggacacaaattcactatcatttggaagaataacagtgttttccactgatatttgctacacacagtggggtccacagagcagcagtaccacttgggagcttattggaaatggagactctcaggcaccaccgcaggtccaatgaattaaactctgctttttttaaggtcatttgtattcaattattatttttttcttttttctttactttcgatgcatttttctttatttgtttttgagatggggtcttgctattttgccgagtctggtcacaaactcctgagctcaaatgatcctcccacctcagcctcctaagtagctgggatcacagatgtgagccaccacacctggcttgtatcacattaaattttgaggagcagtgctttaatatctattccattctcatcacttgatgaggtattattaattccacttatggatgtggaagttgaagccagaaagtttaaatgacttgtacaaggtcaaacagcttacaggtagttgagccaagaggctctcaagtcttctgcctccacaaacccctgttcagctgctgccctacaatggaataaaatatactaatcccagagggacaaatatgctaaaaatctcaatattatacactttggaaggtgcaggtgcattatctttcaattctaatttctctttcaagttttctgatgcataaaaatatgaacagcaggtctgagcaatgtttagatgccgtgctttgatccttttgccattcaagatgtttgatttgcattctgccaaggaatgtctggtaacctccatgatgcagaccacaccattagtcaagagagagctgacgtaccttcatctgagagctggctggctgtgagctgctcagagggaaaggatttctatttacaaattgtatcgattatttataaataaaagttccccttgctttcttcagttgtaaaatctgcagttagagagtcgggaagaagatcaaaactgcatacatttgcatctgccaagcctgataactagttccagaattacagaaatggtgctgaaatagcacctcaagtaccaggctctatcaaatttaatctatccataaggcaactgccaattatattttagagaaaaaatgtagactgaaaagatagacaatccaagtagcaactcctgtaaaattatatgcccataggagcaatcttgaagatataaatattggtatgtttctccttcatttatcatttatctgatcatttgacaagtatttattgaatgcctgttaagggtgtagatatatgtggtgaggctgcaggtgtaagtaggtctttctgaggatatgcatgaagttgatgttcataacttggagatgtgtgtatacagactgaggattccttcagtggatattaagaagtggagtaataggcagtaaagaatacactagtcagttgtggtacataaacacgtcagcaccacttaggtattaacttcctgttttgttttgtgtgtgcttaattacgctgtttattaaacaagcacatcataatctgcagatattgtcataaacagcacaataaagcctgccacatcagaatgtcatctatcaaattaggtgtgttcctcagctgtcccgataggcacacacctgtgcctgtaaataggcgcttggcggagattgcttccaggtgtggatctgttgggcgaccttgggatgtagggcactttggaaccttttcctctagcttcaggaattaacctctgggcttggttccatgccagcttgcattttgctttgggacagtaacatgtaaagaatatgcctgtgaatttagggttactgagaagtcctcatagaagaagtaaaatttccttgaggaatgggagtcttttattcaatccaggtttaatgcaaggcttggtgaacagctccagaaggttaataattgcgtgcgtgtgtgtgtgtgtgtgtgtgtgtgtgtgtgtgtgtatccttttgtcattcaaaagtatacgtatacacacacacctgtacagctgatgataaatatacattgtatcaatgagttcaaatgaagtgtgctattcattcactgaggaatgggctattataatgaactattatgatattagaaattgtcagggcaataagcaaataatacatacggttttcaacaaactttctaagtattgttatcagtgggtttgcttaaatctttttttacaaatttatttatttttttgagacgaagtctcgctctgtcgccaggctggagtgcagtggtgcaatctcggctcactgcaaccactgcctcccgggttcaaaagattctcctacctcagcctcccgagtagctgagattacaggtgtgcgtcaccatgcccatctaatttttgtatttttagtagagacgggttttcaccatgttggccaggacagtctcgatctcttgaccttgtgatccatctgcctcagcctcccaaagtgctgggtttacaggcgtgagccaccgtgcccaggcaatagccccattgctcagtgaatgaatagcacactttattttaactcattgatataatgtatatttatcatcagctatacaggtgtgtgtgtgtgtgtgtgtgtgtgtgtgtgtgtgtgtgtgtgttgaatgacaaaaggatacacacacacactcttattaaccctctggagctgttcagcaaaccttgcattttttactttcattacagtgtgtaaataatttagcaaattctaatttgaacctgatatcaattgagcatttaatatttagccaaatatttatcaagtgctgactgtgttctagatgctggggctgcaatttcgaaacagaccattgaggccctcatggagctcacaataaatgatcttccttaaagtatcaggtctctggtttgttaccgtattttttaaattgttaaggaaagaaaaaggccctatctttttgtagacaaacatgccctaagtgcttccagaaataatctccatcaggtaatgcagactgtgtgtggagtgaaattgagtccaatccatgatccagcagagtttcagcccaggatttctttagagcctttgctacacacaaagttggctgatgtgccattcagcatcccagcagctctttctcttcacactagcaatggcaaagctttgtgcggaggcattgctggctgctctgaactaaaagcatccgtggggaccgaaagaggtttttgcacaccttattaaggtaggcaagtgtgtctgagtgtgtgtgtgcctaaaagctggaagacatctgttgagaggaaagtgctcttctgtgggtctggcagcttttctgtaagtcttctattctgatgcaggagcgtgtgagcagtgggtgggaggagatgctttggtacttggaatgctgaggtccggattaagtggtattgtaatagctagttagaggcagaataaaaagctgggaatcaaagcatttaaaaatgcatccttccattatttgctctcaagttaaaccatattcattctaggggaaattaaaaaaaaaaaaaaaacacagcaagggcaagtagcccaaatctgtaaggtctttgagcttctctgttcgtccagcttttgaagtcttcctacagccaatttgtttggctcctctggagggggcaattcatatccacttccctctcctggagcatttctttcttctatactccatcagggaacaatagagtttaacagtaacaggcaattttttttttttttcaaagcttgtgccctcttctgcgtttaaaggtgttttttaagagactcctgctaggggaatcttggcgcctgtgtgttaagacggcaattaacttttagtatcagtgcttacattaaattttctctctttctgctttactaaagcagtcattaaaattcagtgtgagtaccatgaaactttatcataaaaccctgctttgcttagagaaccttgattgttttctgaaagcagccttctcagtttatatatacatagctgccttccttggaatatcaaattgctttgtgtcacattaagaaacactaggttgaacctctatactgtgttttatctgagaaaaatactactgcaaaaagtttgatttgttcaagttttaggatgaaaatttctttgtaacaagttatttgagttgcatactatgtcatcgtatatctctttagttcaagtaattttgcaattaacatacggttatgtaaagaagataatgatttattttttatttatatttttaaaagttattaagtgaggttttcctttcagtaagagtttagaaaaaatagccagaacaagtaactggacttggaagataaagatacctttgcacttctaaattttacctttgtacacttcggttgtgatttaatcattgaaatgcctctgctttgaagtaaatgcatcacttatggtgtatgctgtgttttaataaagggaaaacagttatgggttctctgttgcacatttgaatgttgttattttttgctgtatttaataacctcttttttctcttgtgaggtttactttggaaatgaggcatgttcaaaaataggctgacattcagcttctatgttttaaatttaaatgctgtctgtgttttatcacatctggaatgtgtggggagaaaagataccaagttttattatttagatttaattgtagaattgcagattgatatttttcaatgcattttcattatagtttctgccatggaggcagcgtgagggctttcaggaagatggagtggtgtaattaccaggtgcgcacgttcattaatccttcctggctagagaaagcttcaagttcttctccagtggcccattcgtaaagctataaatatctaaattgtgtcagccaagaagtcacacagaatggtggctctttttgagttcaatttcatgcactgttgctttggtcttgtgaggaaagctctgaattccttaggatagtcttggttgtgaagttccaaaaacaaaatatcaaatcattaaggatttaatttaaaatacatactcttctttcacaaactagatgattgcagtaatgtggattataaatttttttttttgctttatttctttagagctcctctttttattttgtatgatcaagattatagctgagattttggtgatttttttaaaaagatttatggcttatggtccatcagtctctccactacttcaaacctgtgtacccctgtatattatctgcagtactggaatgtttgcattgtatgtggaagctatatacgatttggtaaaaaataacacttaaaggtcttcgctaagagtgcttatttaatcattaaatatcccttaataaaaataattccagagatattgtctgtgtacaaacttaaaaaaagagaaatataaaatactgtgatgtgaataaaatgtatagcaatacactccaataataccattcttatgttttcccttgttctcaactgaaataactaagctaatagagacgtcagtaaggaatgtgttgtttcttcataatacaactacaaactcatctgataagaacaacctgagagtgaacgttaactttcctcattagaaagattcaatttaacacatatatacaaatacatttttaagataatgatatttgcagagtttttgtattctatggagtaaaggagaattatcacatattcaaagtaaaggtataaaatacatcttaatgttttacttaaattttaaagggtccaaaatatactaaaattgtttttctaattctttcctatgtttaaacgtgccagagtcattggaaataggacattctttttcttaagaagattttgcccaaaatatttaaaactattttcttttcccttgattttacaatttcaatattcatggatttttctactttaaaaataacagtagtttttatgatcttaaaacaaatgtttaagggcactttcgctctctggagactataccatccacatatttattatcagcaaaagaaagggcagggcatacttttatttgaagttgagtataaaaatgtgtctgtgtgtgagtgttattaaaaagataagtgaagagacaaatatagaatccaggaacattttcagcctggcttttactctctctaaaaatctaatgaaacccttgagcatctcttatctcaaggtacattaggaactgtccaacactatgatccgatgggagatcagtatattcatataaagaagaaaatttgttgttagtgaaagtcaagtcttttaaaaaaataatagttacagcatttgcaatatacaagcataatagatttactcaacgcccaccccccatctttaaaaaatcaatttccgacagttgtctactttaaaattgaacatatttgctacctggagggaacattgtaatgtagcccatatgtggtatgcatcctgaagaaaacctgaaattatagaggaagttatcctgccttctttcttctgttgaatgagttaaaatatattaacaatttgcctttcactttgtatttatcattttgtatctttgcatatttacatatacattcatgtgtacaagggcatatatactcacaggtcagggctatttaaacagctatttatttgaatatgccagggaaaatctccaagatataaagaagcagttattagatactatgtcagtatagaattaacagccatcttttttaagatggaagagaaaattaattaattacatacaatttctaacctcaagacattttctttctggagacaaggaatactgaggtgctcacgatagtgaagactcaacaagaccctaataaaatagatgaggataagtaaaactacaatagccaataaaaaacaaaaaacaataaaccatgtttcgctggcatgttggtgagtatctctgtaatatctgtcaataagggtctctgtagatttggagtaatgttcaggaactacctgtactagagaagacagtggagaggactccagtggctaaattctgctgcctttgcttccagaaatgtaaataataaggaggtattgtggcatttcctggaagcagtagtcttgtttcatggtctgactgtataagaatgcctagagaaacataacctcagctgactaaactcccttgatgattgtcactttgtcactgaactctgaccataccttttgcctccagaggcaaaagacgggtgaggaagtgatctcctcatctggtttttaaacaagtatataactagagaactggattatctcctaaacccactcttgtccctggaaaaaggggagtcatcctatccgtttcttagccaatttatgtatactcttagtttgagagcatgagaaggaaaactattttcttttcttaccttggctgggtttttaagaatttatttttagtttaatcaaaataatattttaaaaggtagtaagcctctcataagcagtttgatctgttctaaaataacttcaatttttctttttttaaactttcttttatcttacacacaaagtataatagtaatatgtactcactagaacaaatgaaacaggatggagtcacatagagaaatatatcatattctccctatcccctcccttaatattaacatttaggtgtcatgtgcttctccattaattttcattgcaaaggcctaaattttcttccaagagtgaggagtagcagcacggtagtttggacctgatatagctctctttccctagccttttgcttaagtgctttcctaggggctgactttacttacctaaagatgtttcaagcaagggctcacatttttggtagcagaagacacttactgattgctctcactaataattttgaaaggaatgtcaaaatctgggaggatcatgaaagaaatatcagaaatttcctttcagctgccattctccttaatactgttatcaataaattcagcatctcatatgtgatagcaaaaaaggtgctgccttttgttcttgcatcctgaggttcttacctaataccatggtagcaataaagatggtgagaaaattgcttcttctatggtgttcaggtcctgaacgagcaccctcacctccacagacggtggcaggtattcaagcattttacagactttggagttaaatatagcagtgttattctaatttaggtatgccaccaccagcggcaccggcaactgcaataggaaaaatgattggcaatgccagctatctgatgttttcatgtgccaggtgctgtcagttcttcacagtattacattccatcctcacaacaagagagtgccagtgagtgttgctgtgtgccagtgcccaggctaagggctttgaacacattaccctgttttatcctcataactttccacgttatttttattcctgaatgaagaaacaagttctctgtagagatgctgtcattgatccactcatatcctttcacatccgtttaacattttccctgctgtgcttttactcccaacaactagctccctaatcgctctgttggagggtggccttgaggctgccagagcctatttggtctgtgtaaagagagagatggatctatcctggaatttatgtccctgtgtgtgggaagcccttaatcaatgactgctggttgcagacacataaatacgtgagctttcttgttcccaactgagaaattcagaagtgtgaatggcactgccaccctgggcttttatgccatatatgtgtttggtctgtttcccttcccaatctcacttcattttcccttaccagtgtttcttgaaaacacatcccattagatcatttttgcatgaagcttcatctcagaacctccatttagggaacccaaactaagatattctctaaaatagaaactttattgataaagtttccaaactgtcttagtagatggccaatataagaccaagccaaatctttctgggtccaaattccctgtctttaattaatagactccattacaacacattcttcaatctttagtcagcaaacacttaccacgtgcctattttatggcatattatatttataccatagttaggatattatggttcatgaatattttatatctgtacacctgaaattctattgacctctctgggccacagttttgcatctgtaaaatcagcacaataatgctacttatctcatagagtagacttaaaaacgaatgaaatgatatatgccaagtgttgagaatcacaattggcaattactcatgctcattaaatattagctgtttttatgagtattgtttcattttcggtgcataatatcctatgcaaagaacaaaaggtattggtataggcattgaaacttgaagcatagaagaaaaagttaattaaccggtgccccactagatgcctctaactgctggctccgtgtatccctttagccttggctcgtcacgagaaaaccttggagacatttctgctggactcagcagatcaatttaagaaagatgaatgacatttttcttgaaatgtattcagtcatagctgcctttttctactttcatattttggagttcttagaaaaaattaaggactcctttttttaaagaaaatggtataaaagaaaatgcatatcactttgtcactttattattgtaacctcatcaaagtattcagtgtaaagacagtagccaagtgaactcttcttgtaatgctcggaaaccattttagcaatggtaaaattgctgcaatttatattcgtcaaattgcatgatttgacttattttagaaaagttattaacttctgaagagaatgcttcagaagcatttaaatgagtacaagttatcaccagtgatatacataaatttcatttcaaaatatacttctagaaactgtacttagttagctatagtatttgtacaaggattaattcctatttcattttgtaggaatttatttatgaatgtctatggcctgccagtgtaaagcagacttagagcatcatcttttacaataatctttttttttttaatcaaaggggagatattctggtaaaacaaaacaaaacaaaaacaatagtttattctgcatttttattaagtccctctgtaagtcatccctgaaatgggatatgtagagtcttatatttatttatttctcagaagcttattggaggtgatatgaaggattttaagaccctactaactaacaaaacaacaatttaaaattaattttcaaaataccttaacaaatcttattctccttattttcaaattctttaacaatgtttttcttattactaacataatatcttctgatgtagtcataataatatctaaaatgacaggtctaagtaacttacatggattaattgagtcttctaaatagtaaggtagatggcactattacttctatatgagaaatgaggaagtagaggtataaataagaaattttttggccgggtgcggtggctcacgcctgtaatcccagcactttgggaggccgaggcgggctgatcacgaggtcaggagatcgagaccatcctggcgaacacggtgaaaccccgtctctactaaaaatataaaaaattagcctggcgtggtagtgggtgcctgtagtcccagctactcgggaggctgaggcaggagaatggcgtgaacccgggaggtggaggttgcagtgagccgagatcgcgccactgcactccagcctgggtgacagagcgagactccatctcaaaaaaaaaaaaaaaaaagaagaaatttttttgagtgtatacagttagaaaatggcaaaatgggaattcagacccaaacagtaagactcaaggatacctttcttatcagtatgctaatatgaaaacctaagcatactagaaaatctaagtgccagttggaaaccagaattaacattttggtgtgtaactttctggctgctttttctatgctaacaaacatatatgacatacaaaaatacacacatacacaaattcctgttcactacttcttttatgttaacatcacaatgtaccgtacacagctgtattattttatatttgatttcatattttttctaaagtcagtgtatttgtcaaatatcaacttatctatttaataggaatatgggatgatctttgcttatacatacatacatatgtatataaaaacaaaatcaagtattttaagcgttcaccagaagtcatatgtcaatcagtaaagtatataattttttgctgccaatgacatatatcataaaaacgctacctatcatagaatgaaaatgaaacacagcaatattgggacacctattctcaagcaacagctttgtgatttattagctatctcacatgaaataactcattaacttggtattccaagcagcaaaagaaggatcacttaggtcacttgcaaaataatacaaagctaggtttaggggtgggttgcgcttggtgggatgtagatgaaaccatatgggcccttgagtttataattgctgggatctgcatggtgggtatatggatgtttattacagtatgctagtgagttaagaaagaagaggaattattattgacttacatcatagagtttatgcaaaaattaaacgataatttatttttaaactctagaggtataggtaccatcatgaagggacccacagaactgatgtagccagtaattattggagctggaacagatactctgctgtcagttgttctggttttgtggtcattgttcttgcctttgcaagttaccaactctaagaccttgggcaatactttaagtcttggttgtctcatctgtaaaatggggagagcagtaagtgtcttaaaggtttattctcatgttatatgacttacggtatgtaaaacatctgcgtttagacacatagagggtgcttaatggatgattgctctcattattaggctacatctaatctatgaatttaaaaactgtatagaaatatgtgacagattctttaagagccaaataccaactacagtgaaaaatacttaacacttgctgagctcttagtatgtgtcaggcttaactaccttaatgctcatagcaatcctataagataggtactcttgttatcctattttatatcttctaaaattgaagcaagggaagttaaataataggacaaagatcatacgctatctatccatatatacccatctggctgtctacctgtctccttccatccatccatccacttattcatctacccatccatccactcagttacttctctctctcccaccatccctttccctttccctctccctctccctgtctctgtcactctcctttacttatctatctatcgatggatcggtttatctatcatctatctatctctatcatctatgtatagttgttaataacactaacattttataaattacaagactgaaaaatgttttcattaacttatggtaacaaaagaccacattgtgaataaaaaaagcagtaaacacaggtctctgcacatatgaaagagatgtcctaaacaggaagagatgtcctaaacagtagggatacatagtatcatacaatcaaaacatggcagccctataaaacttacaaagcaatttcatgtaagttatttcatttgactcttaccacaatctatgaggttactatttttatttttctcattttacaggttaaatttaatatggcttccaataaaaaattagtatggttaataaatatcttgacgtcttgctcctataatcctaccgatagtttacagtaattagtaaaataaaataataggaaaaatacctttgatactagtattaaattataatcatatcattaggtaatttcaatttgtgattttcaagaatctgtaatatggtagcttcttcctactgacatgtttgaattcattttaaggcttataattcacaagtaatctatatattatctaaaatgtaaatgcacattcacatggagataataaattagcgtgaaatggctgtattttgctctctataatttttaacatacaggaaatcactgttgtctcaaaaatcaaggaaatatagtatttgaggtgaacttattctttctactattaacacattttaatatagttctctcacagtgcaacagagcaagaagctttcagacacatttgctgctgcaaggagcatgctgtgctgaacttaaaacaccttccctttcaaactccttgggactgtttttttccaagagacttcaaatgcactaaatttagcatccgttggaggcacacccaggcatattatagtgaaagccccaataactgaatgtgttaccactattcacaatgtttatgtgtgtatatgccttatctatgatgtattgcaaattacaaaaattgtgttattattcacagtaacaaaaacacttccagcaaatttctaacagtgatctcttttgaaataacttacatacatgtgtcatgggtcttaaactttgtcacttttatgtttccatcatgttgttttagccagtgagggttttgtttggttttcatttatgattatatactttcaaaaaatagatttcaaagtgtgaatttgattgattgattgactgattcattgagacggtgtttcactcttgttgcccaggctggggtgcaatggtgcgatctcggctcaccacaacctctaccacccaggttcaagcgattctcctgcctcagcctccctagtagctgggattacagatgtgcaccaccacgcctggctaattttttgtatttttagtagagacaggggttcaccatgttggccaggctggtctcgaactcctgacctcaggtgatccaccctcctcagcttcccaaagcactggaattccagacgtgagccaccgcgcccagcccgtgaattttatttttgaaagacaagaatgtccttgcctaattgcataatagtttaacatcatgaagactaaatatgctttttagccatgacaattttatttattattgttttcatttttaattttctcaaagatcctcatcagtgtactctttttggtcttccttataagcgtattttaacaggacataataataagataaatcccaactttttaaagttgtatccgtatgtattactttaaagtgctattaatataaacgaattagaggcaacttttattcaatcagattttaagtaattttaccaaaaatatggccttgataatgtctctgtaacaggttctctgtaatatacatgctgaggattggtttgtctttgcttttgatactattttaattagaaaagtaatggggaatccagacccttctcatttaataatccagagaaaaatcagtccatgttctaatagtttaaatttttctactaaaacccatgtgagaatccatatgagtggaatggagaggagttcagcttcaaagttggcagatttgagatgattctatggcaacagaaatgtgcttgagggaaatcagttgcggcatcttctataattgtgtcacctagattttgccttaggaatttctagatttccatagaacattgtgacctcaaatgctttatcttaataaagaaataaaagcagattagaagaattatttgcctacagtttgtgggagatgggcaagtcttaagagtttattaggtacccagaacgaaacatattttcttgggcctcataatcacattgaaatacaaggatttagttatacacagtgaccagttagtgaatgacagtcttcagtatctagtagacagtaaacatataaagatgtatttgtggccgggcacggtggctcacgcctgtaatcccagcactttgggaggccgaggcgggcggatcacgaggtcaggagaccgagaccatcctggctaacacggtgaaacctcgtctctactaaaaaatacaaaaaaaaaaaaattagccatgcgtggtggcgggcgcctgtggtcccagctactcgggaggttaaggcaggagaatggcgtgaacccgggaggcggagcttgcagtgagcagaggtcaggccactgcactccagcctgggcgacagagggagactccatctcaaaaagaaaaaaaaaaaaaatgtatttttacttttaactacagcgagagaccctggcagcctacagcatacaattagtgttcattatttagattgcatggatttaatgtgaggggtcaattacttgtctaaccagtgagcctagcctcttgctcaatactgcctgcttcatgagggtgaactgtgctggagaaatatattacaggattatctgcagattttttttaaatgagtggttaagtcaaaagttcttgtgaaaattcagagtaataaattattatgaagttgtgtaactaggtaaaggatagtttcttttacacgggtaaagattaacatgaggaggaaaactttagcaatggcatttaattccattcaatatatttatattgagctcctttaaaaatacagggccttgtggtgggtgctgaggacagaacaaaaaccaagtaatacatgaacataacccttgatttcatgatctagtagacctataaaagttgtcgatatctgatgaaaagaaaatggtaaagatattccaaacagtgtatgcaaatccagagataggatggaggggctctacctgaaggatgatgataagaaaaccgtgttgagtgaagggtgatttgtggaattcagataaaatatcagtcttgaatgctgagtgaatactcaatgattgactagatcccatggacagtaatttcttcaattatgacgatgctagtgtttatgactataactatcattctccatgccaggcactttgccatttggtaaatgtatagtgtgctattctaacaagcatgcacagagcttttactttaatgtatccatgagtttattggggttcagaatttaggtaagctttgcaaggtcgtagcatggagtaaaatatctgaaattcagacccatatctaactaagttcaaagactgtacagatatttctcctcctttgtgcagagaaggataggaatggttccatattatcatggacttagtcagatgttttaaaattataatgtcctgtgttaatgaagaagggatgatattcagtgcatattcttaaccgttactttgcttaatgctctcgacttttctgtgagatggatagtgtagataaaatccccaaggggactcagcaagtgcaagtaaaacaatgaaactttaaagccctttgtcaaaacctctctttttctcagaggatggaagggccgtaaaggttggtgaggaaggatggaccatttcctatgtagtcttctgacaatattcaaacaaaaggagagtcagcaaatcccccttgatgtgggaagttttaatacaatttgcagagtgtctctctggagtagacatcctcctctgcaatcgtgtcttctatatagcctcagggctttgggtaggtaatcctctccaaggagagtcctggagagggctgtctaccccccttgcaccatcctctaacattattctatagctcagctccttgtttctgtttcctgccttgtttttgtctgagtctgcaattatgatgtaagcaccatgaaggaaggtatgttgccagtgtttgcatcagcatatcccccgtgtgtagcagcgcaagggatatagtgagccctcaatgtctatttgtagaaaaaagaatgaacgtatcaacgaaatctgatacatattcattgtgtctgttatctccatctctcttgtcctgccttgttatcttgccattttcacaaaaggccccaaggcccatcatttcttgtgtaacttccagagtgttaatttttaaattaaaattaaggctttctacatgagtgtctattatttgagaaaccatgcaagatcgtgtgtgtgtgtgtgtgtgtgtgtgtgtgtgtgtgtgtgtgtgtgttgcactctatattatattgaattctggattttttcttataaataaaattttaaaaatagttctttaaaaataggaataagatgttttaggaggcacagagagcaaaggagaataaaaattgcaggtttggggttgtgcatactaattgccattgagtaaagagagcacactgaggccatttagaagagaattaacgtgttttgtttttgtttttgtttttgtttttgtttttgtttttgttttgagacggagtctcgctctgtcacccaggctgaagtgcagtggtatgatctcggctcactgcaacctccacctcccgggttcaagtgattcttgtgcctcggcctcccaagcagctgggattagaggcgcccacaaccacgccaggctatttgttttttttttttgtatttttagtagagacggggtttcaccatgttggccaggctggtctcgaactcctagcctcaagtcatccacccgactcagcctcccaaagtgttgggattataggtgtgatccactgcacctgaccttatttttattcatttaaaaatattaaatgttactgcatagggagtaatgggcttaacaatgaggtgaccaaaactcctatgtaccatgcagagcaatgtatcaaatgtttttaactataaacttctcaaaaacataaacctaattgttctgcagctgcaggttatatctgccttgtttgagcaaaatttggtggtgaaaatgccttgcttccatttttccttcaataactgatatggtttggctgtgtccccacccaaatctcatcttgaattctactcccataattcctacttgttgtgggagggatccagtgggaggtcatttgaatcatgggggcggtttcccccatactgttctcatggtactgaataagtctcacgagatctgttggttttatcaggggtttctgctcttgcgtctccacattttctcttctgcttccatgtaagaagtgcctttcacctcccaccatgattctgaggcctccccagtcatgtggaactataagttcaattaaactactttttcttcccagtctcaagtatgtctttatcacagcatgaaaacggactaatacaataacctatataattttgaaaagtacttgtctaatagactttcacaatagaaactatatccttatcaactttgaaaagtcattgcttaatgcctttggataactgaattttctaagattattttaattttgaaagttaaattttatcccagtgttgacgatttttgtatgctacttttaaaatattttgtcagtgatttatatctatggtgcaatcttgtaaaaaattaacaatgcaaatgtggctagaccatttaaaaatcaatatgttataattcagcccatttaatcactttagttaaacatcttaggaacaactcagttccatttgagagaagacacagttttctagatgtgtgttgtggcatcatattgctttacaatatcttacataaggtgaattcaaatcatatcattgaatctgttttaaattctgtcatagcttaagattagtgactaaatattggcaggtttatggaagtaggatgtaaacaagacaaaaacaagggtggaacaagtaattttagtatattattcacttgcacagagaaaagtcattcacaccttcttcagctttgtgaagaaaatagactaaaatcctgttgatatagcaactatgttttccgtttcttgtataaaaataaagaaaacttcctattaggaattagccagacattttaattttctctcttctttctctattttcccttacagtctctttgaaggcaggcaaaatttctataaagttttaagaatgttttaagatttttttattgtgaaatattcatagactcacaaggagttgcaaaaacagtacagagatttcctgtgtatacataacccaactttccccagttacatattaaccaaatacagtatattaccaaacccaataaactgacattggcacagtgcaatcaactagactgtagaccttacttggatttcacctgtttttgcacatgctcttttactgtgagtcattatctgttattctatgacattaaccatgtctatagatttatatagttactaccactatcaagataaagaagtgtttcatcaccacaaagtaacttaaaggattatttttataaagtaatgacaaatgtgtcaaaagccattcctgtgttatatagcaagtatgttttgagttattaaaactcactgatcatgtctttcagtgtcataactttgggtttccctccctaactataataatcctgatgaattacagttgatgaatatgagaatatccaactcttcctgactctataaatatattgactgagattgtaatatttatggtgtcttaaggggcgcttgttttattatgatgatgtgaacatgttgagaatagtaagaacagcccagtttagcaaacaggatatgagtcttctatatccagctcaatcgttgccccaacaggggacatctgcctttgctacttaattttccattctggaaaatgtgaagtgtatgagaatgaataatcgtctccgattttccagcacataataatctgaggagagcaggtacagcaatttaggagctgttttcttttggtttccaaaaaaagttccgtccagtggtctaagttagtcgtttactaagtgatagagcaattggctatgctttttgaacggactgataattatgtggatgcagcaaataggatatagacaatgcatctactccattacagtaaaaaagactctgatagcagttaatccacataccaggcacttagcttaggcacagttggaggaaatggaatggtaatagactgtagtatggcatgacaggagctgtagcttgagattcagaattccaactctgcctctcaatatttgagtcctcatggccaagatatgtaaagtgctctgtgcaggtcttggcaaccatccaccacacacttagtatgcaatatctatctttattagtcaaggatctggaaagctagttgatgagacaaatgatagaaacaagagttcattagatgaaataaagtaataaatgatgcaagaatttaaaaaagatttagagaaggaaagggaacagaactcacatgcaagtagagcaactgtgtatcagataatgtgctagctgagttagaaaccatgtctcatattaccctgaaaataattctgcaaagctgtaggtgttatttttttcatttgacaggtgaattcatgaaggcttgaatatagggttaagtgagttgtttcaatgtagttattgattcaaatcaagatctgaatgactctaaatatggtgctatagagatttgaagtaggataaataggatttgaaaaaaagaaaaaatatatagggaaaggaattggtacactgtagcagtgtcataaatgaagcttcagttgtgtgattccagatgatgtatgtgaggcctaatcaaacagctttgtggaatcaaaatttctgctcttgtctccaactggggacgagttggctcgggattaaggtgggcgaccttgggaagactagagtctaagcaggactttagtccctcataagaattatatgaggatgtatatttgcatacaaattcctgggcccaccgagatctgccaaattggaatgtgtggtgatatcacccagggaaacatagagagctgttataattagtcatgaaatatttagtactgaaattatagattatgttaaataatcacttataggggacatagcagggttggcaggttaaccatacagcaaacagggttgtaagtcagggcctagagaattttcaagaggcaggaattctgcagaatgaaggcctggtctcatgcagcaccatggacagctccgaggcactcttgtttctccaaaaacctgaaatcaaaaactttgcttttcatcatgcaacatacccatgtaacaatcctgcataggtactccctagtccaaaattaaagttgaaaaaaaaaactatactttcatttgaatacagttctcttcggctttaccagctctactctggaaggaatatcttttactcaatgaaaggccatcccctgttaatgcctggccaggttctccttatcagtcattcactatctttgtgtgtgagtgactaaacatataatgctatgtttagtggatggagtaagattacctttgcagaggttgtactggcttacccctttggttcttgtagttttcttctattagagttttttccatccctaggtttctatactgttcaaatgggtttaagattcttgaaggtattcctctgaccttgtaatttatgcttgtctcctagcacaacttttttttgtaaaggaggcaccaactatgtggtttgctggcgatggcatacacaaatcaggtgggaggaattaatgagagcagcaattccaatatctggttcttcaagattaacttgtatagtttaattcagcattctaaataagcctcatagatttaaaaatctagaataaacccacatttttaaaaaaagttttatgttatctgtgctgataatgcacgctgtacataataaaatattattttcttttttttaaatttattattatactttaagttttagggcacatgtgcacaatgtgcaggttagttacatatgtatacatgtgccatgctggtgcgctgcacccactaactcgtcatctagcttaaggtaaatctcccaatgctatccctcccccttccccccaccccacagcagtccccagagtgtgatattccccttcctgtgtccatgtgttctcattgttcaattcccaatattattttctaagtggcagtggaagaaacatggaaagttctacttcatccatcggtggattagaatttgtataccatgagatgattaattttcaaaaccagtttgaatctcacaaaataatgaccctgttttttgaaggacaaggcagaacaaggaactaggctgtgccacgttcaagtcacaatctctaacatttgttttgttttgttttgttttgttttgttttgttttgttttgtttaatctctgttgcttgttcactttctcttgtaatctgcattgatttgctacctggctatttgtagattgacttcggctgccaggaatggaatgtttttcataaaggaacatatgccttaatgaaagtaccataagaagggagtagagtgtgaccaattgcctaggtaataagtagtgacaacaatgatattattctagtataaatggaatcagtttttctttgcccagggggcatgataaagaaggcctggctggtatatactaggtgggacacaccaacagtgcctagaatgtcaatggatcaaacctgagggaaccagaagttgaaaagacatatcccaaaagaaagcatttgatgtttaagggttggcttacttagaacacaatgaaaaatattactaaaattaaaactatgattttagctatttttaaatatgacaaattaaatagcagaacattttaataaaacattacttaaggtccacaattttctgtaagtctaatacatgggtcattaaaataaaaaattccccatgatttatggaatcagatttttttaatacaacgaattctaaatggttttataatgccaattccaattaatatcctaattataacatgtcatccagaagggttaatgactaaattttattaatatttgttttctatttattttgatttgtgcagtttatgtgtatagtaacgatagctgcaaattagataccattagcattaaataaggtatatattttaatagaaaattaaagttaagtatttgagctagcctaaaatattcaacaacttaaatttgttttttgtggatcacatttttttgagacaaagtcttgctctgctgcccaggcttgagtgcagtggtgcattcatggctcactgcctcaaccatccaggctcaggtgatcctcccacctcagcctcccgggtagctgaggctactggcgcacgccaccatgcccagctaattttttgtatttttttttagagatggtgtttcaccatctggtctcaaactcctgagctcaagcaatctgcccaccttggcctcccaaaatgccgagattacaggcgtgatccagtgcactcacccctgtgaaccaccattaaatagctaataaaagatgcatgtcaataaaaataaacaacttactagaatgattatgtgaaaatcatttattcttccaaagcatgaattttcaaacacaccttttgttactgttttaagaagggaatcatttccatatatttgcatgtaaatcacttttagtctcagagaactttccataaaagtttttttattactgctgtaaccgatagagctagtggactattaatttaaaaagctgtacataaaaacacatctatagctcaaataatctaggataccttttagtttggggaaatgtagatgaaaatgaagtaattacagaatccttgttaattttcagatttagacagtctaggcaatatctttcaggaatgaagagatatgtgttttttggcatcttggtagagtatattcccattgtaattcttttgtgaagtctagaccagatgtggccataaaaatagacccctactacaataatatatttcatagataatccaataaagtcaaatcttattgcagtaggcttagaactctgtttgcacccatggaatttatatcagtttttggcaaatcctttcatctctgaggatactttttcatctcacatataccctattttctgaacattttgccttcaaagtatacctcatttatcaagaatttctctttattcatctgacttatacaagtggcaataacaacgtctggttcccatgaagtaaccagtgaccctttgaaataatatagcgctggaagaaagaaaaggaaagggagactgatcattcagcaactctttaaaaccatgtcaccgttaaacacatagtttattttatcttttttttagaattgtgaaaacctatattagcatcttcacggatgtctcctttgtttacatccccgcttctgtgccttgcctgcagtagaaaaaaaaaggacatgtgtatccctattccccattgtcttctcattctacatgagaatgagaattcttttaatttcttctctatctacatgaacccacttccattatctgtttgttcagttctttaaatgccctgaagctagctctgtgactgggcagttgaaagttctggacttagcatcaggttaatttgaaaaatacttattgagccaccaccatatgtcagccactactgtagatgttttgaatgtgtcagtgaacaaagcagaaaagatgtatgccctctggattcttgggggtctcaaatagtgaaagacagatacgataagtatattgtatagtatgttcaaaagtgataagtgctgtgaaaaaaaagaagaagggtaaaataagagatggctcatgctggagtacattccaattttaaatagggtatcatggtattcttcattgagaaggtgacatttgagcaaagatctcaaagaatgaggcatggggttgaatcatgtagatatcagcagtaaactcattttgggttcagtaaacagtcaatgcagaattcctaagccatcggtttatctgctgtttggggctggttatctgcagtgtggctagagtgaagtaagtgagagaggtttaggagagaatgttagtgaggtgagggtggacctttgaagccattgtaaggacgtttttctctttctaagtgtgagaagatgatgctgactgagaccagggtgataagaaatagtcatattctgaacgtgtttggaagtggggccaacaaggatttctggatgaattggataaggggcatgggagaaaaatggagtcatgaatggctccaacgtttttgctctgattaactggaagggataaagttgccctaaactgaaataataaagactatagatagaatggggcgattagggaggcattaaatttggatatctgttagacatatcaccagatatattgaataggcaattgaataaatacctttagagttcagcaaaaaaggtccaggttggacgtttaaatttcggaggtgtttgtataagataacatttaaagctgtgatatcagattgtatcactaaggaagaatatagatagaaatgacaacgtgactaaggactctaacattaagaggtggattgacaaaggagaaaacagcacaggataatgaaaaggaatgatcagccaggcatggtggctcacacctgtaatcctagtactttgggaggccgaggcgggcagatcacgaggtcaggagttggagaccagcctggccaacatggtgaaaccccatctctactaaaaatacaaaattagctgggtgtggtggcacacacctgtagtcccagctgctctggaggctgaggcagaagaattgcttgtacctaggagacagaggttgcagtgagccaaaagattgtgccactgcgctccaacctgggcgatggagcgagacttcatctaaaaaaaaaaaaaaaaaaaaaaaaaaaaaaaagaaaagaaaaggagtgatcaatgagatgggaagaaaaacaaaagtgtgtggtgtcctcaaaaactgacgttctattttcaaaacctacattttgggtctccttttactatatcctgactttctagctatataaccaaaaggagaaagcagtaatttttttagatataacatgttaataactctaagggtattcaatgaatctgaataattcagtggtataatgtgaaaaaatatagtattcataggaaaaggaacagaagttagctcaggaaatgacttgaatgaacaccgaagccaaatctccagcgcaggtccacgtattatttgtctcagtggttgaattagcagcaagattccttagtaggatgaaaaaagatgttgtgagcatctgtatctacatgactgaattaaattcctccaacaatgaaatgtagttaacgtagtatctcgaaaagaaccctaagtggaattcagggaacctaaattccaaccatggttttgctgctgactgattgcattcacttcaaatctatcattaacctccttgtgcctcattatcctcatttcaccaaataagaaaaatgaaatattcctccttccctacctcactaggatgttgtggatttaaatgtgtgagaagtgcttgagatgcataaaatttgatggagtgttttattcatgaattcaaggcatctgaagtaatttgaccatgatggacagttgcttccttgcacattttttagagtgacatttccgttactgacccacccatttatgcaacatgttgcctaatctaaatttaggtcaaaacaaattgaccttataggtaagcattatatctattaatattgtatttttgtattattttataatattcatcattcacctattttctcatgcaatatatgttactgaacacatatagattaaaaagccttcatccctaaataacaatgatgggaccttccatttttatatccctctggcatttaaaatgtgcttttatagccatcatctccattgatctctcagtcccttgaggttgatatgacagatatgctttttccattttaaaattacggaactgacagtctcagatgactttaccctccaactactgtgtgaagaagcagggtctggcactgaggtcttctgacatccagtgtagagcactatacttcacaatatggccattggcttactttattacaagcactaaatattttccactgaatacgtaatacctagaggagaatgtcgtgtaaaacagcagcagtagaacagaggattaaatgacccattttcttgaagttatcttagttttaaagggttttttcttcatcactaatgaccatccctgactaagaaattattctcataatacatgataatatctgcgttttccaatgcgacaagaatgttaggatgtctatacatgatcttgacaatccctagctccatcacaatgtgtccaaattcattttatttggctagacaggcatgtagtcttactttcaatggttggctctgctggatgctatgtgatctagaacctgtcacttaccccttctaaacttcaggaattttttatccttaagataacaagaaaactcgtacctgtttcaaagagctgtttgttcaatcacctatccattgattatcttctatatgccaaatgtttttctaggtgctgaattacaggaatgaatcagaagcaaaaagttcttactctcaaggatcttatatgctaatgaaatagatgttaaaaaataacaatttttgtttcattttattttattttattttgttgagacagagtctcactctgtcacccaggctggagtgcagtggcacagtctctgctcactgcaacctctgcctcccgggttcaaatgattctcctgcctcagcctaccgagtagctgggattacaggcatgcgccaccatgcctggctaatttttgtatttttagtagagatggggtttcaccatattggccaggctgttctcgagctcctgacctcaggtgatctgccctccacggcctcccaaagtgctgggattacgggcatgagccagcgcacctggcattaaaaagtaataacaatttttaaatatcaatatgtcttatacagaaaagtgagcagtgtggtagagtgtaactggaatgtgagttgagacataacaccagacagagaagccagagaaggacttttgtttgaggaaatgacatttgaaaaggaacctgaatagtgacagaggcagatacctaaagaatatgttccagacaaaggaaacaaaaagcgtgcaattgcatagtcaacttagcctacttgaggaaaagtgtgagtggattttggtgatggagaggtaagtgccaggagatgaagggagagatctggcatgcatcagatgatgtgcagtcttccgggacgttgtaaagagttgggctttttttgtttataaattaaatgttaagccattggggtttttaaccagaggagttatgtgatatgatctatagttaaattatgtttgttcttggatggagtgtgcattatgggaatttatacagaaacaagatttcacatatatatatatataaaactcagtgtcaatagaaaataataaaaacaaattttatccattgataattctggcattgatagtagtgggtatggtggtaataattgtgtgtaacactcaaactttctgaaaacctacacttgatctgtaaatccaaaagtatatgtagcaaaagccataatctgctcttatttctgcaccacttgcaccagtgtggagtgataaggcaaattattcaggcacctgtgtaagccttcagtgtcctcacccccttgttataactctccactaatattacattggtaaagacgtccctgacctatatgtcactgagacctcaaagaaaagagcaaagctaaagcgtaagggggaaaaaagccagcttaaaaagacttaaaggtttctgggaccaaaaaaaaaaaaaaaaagtctttgaaaaatgagaaaggaaggatagaagaaaagattctcctttggtcaatctggccaacctttggaaataaaaagtattgtgttgcagctaataactatttgtcactgcaggcacttgctgatgtctgccctttaaaatgacccaaactcgttggcctcgaaatcagaagccaaggaaaaaatcttggacataatgttttctgtagaattaccaattttctctctctctctctctctctctctctccctccctctctctctctctctccatatctatatatatatagatgtatatatattttttctgtaggaactaccaattcctatctatagggactgattgagaagtcccttatagcagtttttctttggcttttaggatgcaatgattattggtgagaataactctttcatttcacatttgtcattggcttatttgaatgtaatcctgattcaatcgttatgatctcctttaagtaggaagagaagctggtattacattgtaggattttaattttgtactcatgaaacttttgaaaaacattactcatactcttctgactgtcaaattggcctctaagaggtccacatctcaagaggtatcaagcattggtaactattttttggtgttgttttctcatcataaaatgtacttttattaggtgactttggaaattttattgaatcaatgcatgacactgcctcattctagtaatctgatgaagcaaagctgaaaaacaaaatttgaggattgtcagtatatatacttttatttgcagtcaagagttatgctgcaaaaatggtttattgaagtaacaaaattttagctgatatattaatctgaaagatacagtatacatttttagtatggaaaagatgaggaaaaggaggttctctttcctctaggtatctagagcaaactgtaactgtccttggtatttaatttttggctaaggtactgagattagaggtggggccttagatatgattaattgtcagactgataagctagatatttcattgagtttctgttgtgctctttctttcagatcctctgttcgatgctttgttataaagatttgggcatttcaaaatcttctccatatctggtgtctttccaaacagcaggtcatagactttacacaaagaggaacgacacaggttataagtagaagtgttttaaaccctgagttcctatttcagttttgctttcttaaacatattttccttatgtgataaatgcgagtgttgaatggtgataaataccacccataggctttaaagcctaaatgttgaatttgacactgagagtttaaaggcatcatgaaaatttctccagaactaatgttcaagcaatttaggttttacaggcaactcaatagttttgaatgatgtagttattttgaaaaagtcaccataaaacgctatgtttagggaattggtactttgcatttatcagaagattgtaaatgtcaatcgattggcttgctatttggaatataattttttaaattatagttcaaatcattaggatttaattcatgattttgtactacaaactaaatctatgaaaaatatcagatatttattttaaattagaggcatgtaaaggaaaatataaattttgaaatgccattttactggatttttctcttcagcccaccctaggcatttgttacataaaatatttctgaggaagtcttccactgattttgtaaacaaacatgttttattgaacagttctttgttgactagattaacattgaccattgtatgcaatgcattctcaaaatcttagaagctggttttctttttaatcatataattttacttgttttacagtgaaattaatgcatgtaaaaagtatacctatatagaaagttaaaagaatattgctaactagttactatacttccaaattgcctattttctgtgtcttgcattggacagtagtgattacctctaaaagaaaatggatggtctttgtttcattgaagggatggataatggacataactggcattcttgagcaatgcaattgcaaatacatgtctttgcatttatggtccaatcatcttcttactatgatagcatataattgaaggttcaaataaatgcctcgtcccttcctgtggcatattaaagagaaagaaaaattagaaatactttcaaagctacctcacatactaatggtagagttgtttgagtatttaggtgatttaacaaagctgatgtattttattatgcttgatcattgaggaaaatttatttatcggaatgcttttgagagcatatatattgtcagagataaacacagctggatattaaagaggtaaaaacagattttattcaatacctcgtgaaattaggggagagctgagatccattctaatttgtgcagaggcgacttggttgttttaaggcaagaaggagggagaaggagtgggggttcattcgagttagagaagtaaaaaagtacaaagggctggacagtgtaaatgtgattaggccagctgtgttagctggaagttattgaagttaggattctatcttcccacagagaacaggagacagaggacttatccttcttgatgatgtcatttgaaaagaatggctttcaggtccttgagtgagagacacttctgatttccaagagctacatgttcacaattgtaagcccttttgagtaaatgttctaagaaacggaggtaagagtcctatcaacagatgtgtgttggctagaacaaacattaaattttcctggcagcactgagctttctcaagcaggcacttaagggaaggctagggtcatcctagggacatggccttctggggctagaaaccatactagagtttagtcaagtcttagtgcaagggtttggacagagttgttaagtgctgagagttctgtatttctcactgtcacaaaggaagatcagaagctcctgatacttttttcatcagtacaattgaatatataaatcctatacacaaaaataaactaagcttatacaagcatattggtcaaggaatgttgctggccttattaattagatagcccagttaaaagaagaattttttaatataattaatgttaaagtaggatgatagtatataaaacgtgtctactgtcctgaatacaaactaaactgtttggtttagcatttacctcaagatctcttaatatcccccaaagggtccctaaaaccacaacttatctttgtgctcatgaagtagagaagagacagttaatagacatttctagctgatagactgttgtagagcagagaacgctctgtgtttttgaaaattaaacatatgaatttgcccctcttcccctattaaggaagaagagtttcttaattgtgcgaacacatcaagtgaactattcaattagatttttgtgacccagggtataaacatctggttaaggttacatatttcaaaggaacaaaacactagaaactcttggttttaaatctcatggctggaggataatttgcagcagagatttatctggcaagcatacagaattgctgagactgttctaaagatgtaagtgtgggtgtttgtgtcgtgaaaatagctgtttacatctattaagtggataccgatggttgaaagtgccgtctatgtcaagtttttaccaaatcaacttttgcctcactgtgtcagaccattttacctaatcaacttggactgctaatgtcctttcccctggcaccactatctgtctcttttgcaaagcacagaaacggcatgcatgattgtagtttataaaacacatgtaccaatgtggtctacagcttctgttgagttcgagagggtcagtttctgtaatctcttctggcacagagtcaagaacagcttcactttcctcctgctacctctctacccgtaagtgtgaacccatcactttgctaacactcaggaaggggattacacaaaatagagcaggagccctctgacctgaatatgcatctgagccctagccatagagcttctgattcagtagatctgggatggggcctaaatatttgcatttttaagtgtataagtgatgctgatgctgctggttccaggaccacattttaagaaatatcgataaaggtggagaattaaactgcagctcagaagacctgagttcttgccccagcttgacttttacaatctagcaaatggataaaactcgcaggacttcagttctcttcatctacacagtgagtggttagattggctttgtaatttaaaattaaacagggtttgattctgattcactacacaaggttccaaagaaggaatgatatctcctttcatttcttcactttgtcttctgtccctaggtaatcttatctatgttcctgatttaacctaactaatgtttctgcaaagcttctaatatttacatctccagccctgaaactctcatttgaatgctagtcttatatacatacccccctgcctaattgacatctccacttaaatgtatcagaggcaactcagactcaacaaggaccaaactgaatgttcgaccttgtccttcaaacccgatacacatccaggttcctccatcccagtgaatgacactatccagttaagcaagccaaaagtctggattttttttcctcactcttcctcactgtccgtcaactaccattattaaatctgtcacctggtcctactgatttaaccttctcaatatctctacagtttttctttatgcccattagtatcctagtgcaagctaccatcgtctctcattggaattaacacagtaacccccctacccaccagactgttctgcctacagatagtgtgatatttaataaatataaatctagccttggctagatttctccttcaaaaggttcacattaattttagccttaaaatggtgtgcaaagctttgcatagtctgtcctttgctatgttggcagtattttttactatccctctcatctgctcattctctgtactccaactacactaactttgtttttttttttttttagatttctctaactacagtgctgtaatctctttttcctttgcacgtactattccgtttgtcagggaatctgctcactgtctccacccactccacacactcacgttttcctgcccgtcttaccggtcttgatcggttgtcacttgctcaggaaggtttccctggtcaccccctccacaaattgaattaagtcctcttgctgcatgctgtcctagtgctctttattttcctctcctcatccttaattcagtttgtaattacatgttatttgtgtgaggatttgattattatctgtgtcacccactagatattgggcattctttacttactcaccactgaattcatagaaccacagtaattgtacacaacaaatattcaagagaaatttattgaattgatgaatgaaaagttgtaccttaacatgttcctgacatgtatccaaaaaagagctcccctttggggtctattaggactttggacctaggtaaacgtaaccctagtttcgctcaggtttaaacagtagaaagtaattgggtctcttttgcatgtggctttcctaagggctaaccctgtcttcggaatgagtcaatacagcagagctgttgaaagcagactctagcttcggacaacgttggtccgaatcatggttccgtcatttcttagctgtgtgatttagaataaattaatgttttaaagctttgatttcctcttccttaatctggagatgctaataaagccaacttcgtagaggtattgcgatgagtaaataagcataatttgctgtaaacaccttgcagattgcctgttgtatgctaactaatcaataaattgaagctcttaacatcattatattagatatttccagcattgagtatactatcaggcatgtggtagaagctcaatataaagttttgttaaattgaatagattccatatatggtatttctacagcattatgctccttatttaagtgtctctaagtattttttaagtatcacctcacaaaagacagatgtttaattcattacacatgtgaattgttttagatagaaaataaaataaaaaattcaaacattgaaatcaatagtgtaccttaccttaggattacaccataaaatttctaccaatcgagaataaagtgtacagtctatttcctttctaatacttttaacgcaacaaatgtttattgaacacttactacttctaatctatgacagacataaagatgaataaagcatgccacaatgtttaaaggagctcactatatcataagaaagcggattcacacagacaactctataagataaagtggtaaatttaggctggcctgtgaaacaaaggattataggtatagttaagaggtggaatttattttacttcgaggatttcagttacctttatattctttgtctaacctttcatgtttctctttcttcagaaacagagcacctttttcctgacacattcatttccccctatggagtagagcagttgttttcaaagtgtgggtcccagatcagcatcacggggatggttagaaatgcccattcttgagcctcacaacagacctactgaaacagaaattcttggagagtggagcccgcagatctgtgatcaagccctgtaggcaattctaacgcacactcaagttaaagaaccacgggaagaaaggtccatcctgtaacaagacagatttttttcattagcatcaattttgatcatttatatatatatatatatatatatatatatatatatatatatgcatgctcacaaaaccattcaccttactaggttttagtattccccttcctgtattcatgtggtatgtatgtatacaagatgaacacacatttacctgagacaaggtaagactacacatgtctcatttggggaccagaggctgtaatcttactcaaggtcaaagcgtcttcactgctttctttcactgcttttcaaaagtaaaatttccatgtaggtgtcatttgttttctttttgtgttttagaaaaccgattaaggggtgaagtctggctaaacttagtgtcaggacatttacttagataaaattattttaatttatcttgtaatgttcaatgtgagaagaaaagtccttatgagtagtgtattccttaaataacaacaatttaaaaactaccactgaagtctgtcagagtagttttgcctcatttgtctagataagagaaaaaaggttcacattagggattgcaatttgtctgccaaagtgcagtttatttattcagaaacatttagagaggaatgtgtcagttctgttgcaggcactgtgctgtgacggggagctcaagatgatctcaaaaaatttcacagatggggtgggcagggggcacagagagatgtatttagtggttcagatactatttagactgtggccagcatttctctaaatgcaatccagataacaccttacagaatcatctgggcagcttgataaaagctgtagactcctacccttcatcccaaacctattgaatcagtgtctgtgtgtgaagacctagattgtgactggtaattataccaaagtcttagaagcaactctaggccagtaatactcacatcagaatcagctggagggtttgctataccacagattgctaggttagccttcagagttgctggtccagtaactttggtgcaggtccagattttgcatttccagcaagttaccaggtgatactgatgctgctggccttgatcgtgctttgaaaaccactgctttagctacgctataggaaaaaccatataaggcttttatactggccaatgacttcacaggcctgaattttagaaagcccccttctgcagcttggcctatagattcgaaggaaacagaactaacacaagaaagctagttaggagctagttaaaaatcatcctgacttgccaaggaaaggtgctgaagacctgggtcacagagcaaatgcaaaacactaggactttgtccctagttcaccattaaatcaacttattttctcttaccccctcatattcacgtttactccttactttgtagtggttggacaaaaatcaaataaatctgagaattctaaaatgcacacccttgtttattttctaactcaaatatgccactgttgtctgtgctctgtcaagatttcaacacatctttttctcctgtttgcttttccttttggcatatagtgagtgtgtgtatacacacacacacacacacattttttttgactccttccaatgcccttctgctctccgcagatacacttctgcattctgaataaaaccgaatacatatatatatatatatatatatatatatatatatatatatatatgcacacatattttgaaaaccttatttgaaaagaaagctttcggaggaaacgttatttagccacttaatcgagtcttttactgagggactttttgtcgtcccctaacttcctgtcagcagtccacaggcagcaggaataatgtgggagaagatcaacaggcttatttcaggaggtcaggggccagtgccaccacctgcaggtggagacatcagaagcaggaagcagcccaccagctgcagggagaactccccacagagcctaaccaagatgaagggacttgtaaatttcaaccctcccttttggcttttgtgctaaaaatgtgaatattgaggtctgccctgattaagaactagatacattcctctttgtgactgccacacttccttagcgtattcattttttgtctttcgatctcaagttattattttcaaatgcattgcacgtatctaccatggataccattgcaattggaaggagcaaacgttttgtatgtttacttgacaaagagaagtgactgcccaagccacacagagttctgcacaaatcagtaacttctaacgaacgtttgcacttccgggcttgttctctacctatttcagtcgatgcatttgtattatttacttcaaactccaatactaataatgcctcaatcaggttgcaattgggatttgagcagccagaatttcagaaatttggtttggtccatatctgtgacaggtcagtaaatcagagaagcaagggtttggttgctattataatacattgcttacctatcaatttagttatcagccaaggtggttgttatcatccaaagtggctcattaaccaccttggagactcagtatacaattgcaagtaaccctggaagttgtaaataatcccaactgaatttgtatgagtttggtaaggttaagtggaaaccagctgcttagggccttgattataaatgaagttaggagtggaagaagtaacaaaaccccaggcaaattcattaaacattttttcccttcaactttatgctcacgaatgtgttgagactcttctgaatccataaaacacctttcagcatcatctgggcagcttgataaaggctgtagactgcctgcccttcatcccaaacctactgaatcagtgtctgtgtgtgaagacctagattctgactggtagttataccaaagtcttagaagcaactctaggccagtagtactcacgtcagaatcagctggagggtttgctataccacagattgctaggctagccttcaaagttgctggtccagtaactttggtgcaggtccagaatttgcatttctagcaagttaccaggtgatgctgatgctgctggccttgatcatgctgtgaaaaccactgctttagctaggctataagaaaccatataacatggacaaggcaaatgaaaaggttggaattcttctgaatcccaacacatttgtgagcataaagtcgaagggaaaatgattcttctgaatccagacacatttgtttaaggataaactgttttttccttctgaaaatttaatgtctgattctcgttcattcattcatcaaaagttatcaactatcaactataggtaggaactgtgcaatatgctggtgataaagagatgaaagacacagcccctcccttcaaccagctcctagttgaggtggcaagtcagctgtataatcaagtaattgcaagactgtgcactgaaaagggtgaccacagggtgtgatggccacccagggctgtggaatcagtcccaaaatgaagaatgaaagcagggaagggtaattcagaaagaagaaacagttcgcataaagacccatagataaacatcaatcagatgtggttaagacaaaagtaagtttctggaggctgaggaccttctcagctatatgtttgcagtgcttggtatagggctttatgcatctacatggaagacagaaagggccacatcacagtggacaaggcaaatgagaaggaggcagtatcagaagatgagggtacaccggagatcctagttatatatgggcattgtgttcatctcaggagttactgagtaatgggaccttgactcaaatgaatctcaagtctgtttttgcctaatcttggttttaggactaggattagcatacaaccgcactaggagcctagttatacgaaaggctgcattgcggacctgatacagttcaatatacatactgtcaccttgcaaatagggttacgttagttctcaagactgccaatcctctgtgctctaatccttttggcttttttttttttttttttaactgtctcactctgtcatccaggtgaagtgccctgggatgatctaagctcactgaaacctccgcgtcccaggttcaggtgattctcatgccacagcctcccaagtagctgggattacaggtgctctggcgccaccaggccctgctaagttttgcatttttagtagagacagggtttcaccatgttgcccagactgatctcaaacgcctgacctcaagtgatctgcccgctttcctttggcttttaacactatagagcaagggtccccagccctggggccacagaccagtacaggtcagtgacctgttaggaaccggggccccacatcaggaggtgagctgcagggccgccagcattaccacttgagctccaccttctatcagctcagcagcggtattagattctcataggatcacgaaccctattgtgaactgtccacacgagggatctaggttgtgtgctccttatgagaatctaatgcctgaagatctgaggtgcaacagttttatccccaaaccatcgcctcccacgcacctctccccacaaccccacccgcccctgatccatggaaaaattgtcttcctctaaaccagtctctggtgccgaaaaggttggggattgctgctatagggcgatggttttcacatttgatcctgcatcaaaatttccaggtgactcattaaaatactgattgctgtgccccactcgtaggagttctgataaggtagctgtggggtgagacctgagaatttacttttctaataagttcccaggtcatgctgatattgctttgataaccaaagcaatatcagctttggttatcaatatataaccaaagccacatagagggggagaagttccttgggtttagcccagtgtttactgcgaccaccaaaattgctggagcttaaccatggctcagagagttatgttctgttcactctgtaggctgctattccctgtcaccttttgaactatgatggaggggaagagctgccagctcaggagatttcacttttttctctgcataattgaaaatccagaaacacagggttttgggaaagctatagaacagatcatcagtgatcagtgtttaataaagtaaagcaataaactttactgtgtaaaataggatactttattatataaattttgtccccttcccccacctcacaggccaataaaataatatacttcttgtccctgggtgtaatgttattggaaacctttgaatgtaggagaggcatgggcttgtaagttgcagaaaactgctagcctaggattgagaatttcatggataatccaaaaatagatgattttacagttataagccttacgtgaacttgaggtaagaaaacacaatgcctttatagtcttctcagttgctccacatgccctctgagattctgttctgcccagcctctctggttgtcacatctctgggcattaacagaaagttcacatactctttgtctctgatgataatccttctaggtccatatagaagatccctatccaaaccatcccccaaacaaacctattggttaaatattttctccaccgaaggcactttcttagattctaagtgccctgtaggcaggcttcctctctgatttgggagagtacaaattgcgacaaggttaaatcatagcctgggaatttgacctaaaattcactcttctcccatatgcattcatgaaccttctgctggtttttaaaagaagctacttaatgtcagctcgaagaggttggaaggggttaaaaacatgagcatggcagtaagaagatttatgaaggatctgagaagattatgacttgatcagatggtattttgtcagctagccacatttgtgaagacttgaaaactagggaggcttgtccttctaagagggggcactgctgggacctggattctgtggaaccgtattagtagaataaacaataacctttgcttgtatcaaatgaacttctattctcatgtgtcttttgacatatttttattaatcatatcactgggacctccttgctgaaagatatctccgttccccattctgatgactcccaactaggagtgagatcaaatgaagatggcatggaccatttctccatgtgacagctctctgtggttgccttttaacacttctaatgccctttctcttaagaattcccatttgtcgtctggcactggtgctgtgatcaataaaaatgtaatggagtgaggcttagaaacatgaggaaatttactcaagctatccatttattgatgtgtccatttgtgttgtcagggaagaaaaactttttcactcccctcttaggttcattacttggggggctgcaaattaaactgacgacagatagattggcaatagaaaagacaaagtttattcagagaagtatgtgggagctcacagaaaacatagctcaatgaagttagaatttggggcttatgtactattttaacaagggttttgaaaagaagagtgttagaatttcaagccacaaagttggtgggaaatatgaaagaaactaatgaaaggtaatgtttgttttagtaaagtctgtttatgtaattttcttttcccagcgacaacttctcatctctggtgacaggagtcactctttacccctggtgcaagaaactttccttaaaggaggatttaaaacagttgaattatttcagaaatctttgcttttaggcagatagggggagtacagaaaaagccccttcccgtatctgttgatcctcaaatggctttagctcaaaacaatttttacatcacgatggcataatgtagatctcttcaatgtgttcatttattccacagatatttgtgaagtacatgatatatgccaggtacttgggatacaagaatacataagtatgtccctagtctcgtagaacttacactctagtagtgagctagagaataaatgatattatttattatatgcatacacatatgatttcagatagtgatccatattggaaataaagctggttaagggaatagaaaatgatattgaaggtggacttgtttagattgggtggattggcatggcttctctagggggcagtatttgagcagatatgagagcagatattctccaatttgggcaaaaacattccaggcagaggaaacaagggcaagggcactgagttcaaaagagacttgacctagccaacaaatagcaaggattccagtgtaagagaaggtggggaaggaaggaggtgcaagtataggcaagggcaagatcacacgggatcttgcaggccgtgataaaagaatttaactctttcataattttgacaggacatcattgaagaatttagaaaaatagagtggagatacctgatctgctttcttcaaagagttcattcatcattgctgagtagaggttagactgaaatggaagcaatagtgaatacagggagatagcacaggaagccacgttactagtccacatcagaggtggttcagactagggtggagtggtggggtcagttagagagctggtatttaggatacattttaaagacaaagctgacaggatttgctgtgatgaattagatgtaaagtatgagaataattgagaattatttctaagttctttgctggggaaaagtggaggaggaaaaagttagggtacaaggtgtgatgaaatcaagagtctctcttattatcagagtctcattagatatccaagtggaaatgctggaaagaaagttgggtagatcagtctgaagctgaagacagatactgtgactggaataataacgtaagagttggccggacacagtggctcactcctataatcccagcactttgggaggccaggataggagaattacttgagcccaggagtccaagaccagcctgggtaacacagcgagacctcgcctctacacacacacacgcgcgcaaaaattaatcgggtgtggtggcacatgcctgtagtcccagatactcaggaggccgaggctgaaggatcacttgagcctgggaagtcaaggctgcagtgagccgtgatcacaccgctgcactccagcctgggcaacagagtgagaccctgtctcaaaataaataaataaataatgtggcagtcataggcccttagatggtttttaaagacatgggactggatgaagtcttctaggaggagagtttgggaaaagagcccgagaattgactgcacctttcaaaacaggaggaagaaaaaaaatactcaaaggagacaaaagcaacttctgtgatttatagagaaaaccaggcaagtgggatgaagaaagtccttcatgatagaatcaaaaacagtgtcaaatgttgaaaatacaattagacaaacacaaaagaatagaccattgggttttgcaatatggagctcatacttgaccttgataaaagacattttcactggaagcatgcatcaaaaaactatttgtggtaggttaaaatgtagtaggaggtgaggatatacagacagtggctttcactgtgcagatactgctgctcatgcactaattaaaagacatttgttgagtatctactatgttgtatccattgctaaatagtaacagctgggtttagtcaggtagaacagcatcaaaatcattatagtatcccaagataggtacagtaaaatctgtgaaggaatcagagtagtctcttctccaacagagcgtaagacccagcttcacggagaaggtggtagattagctcatctgggaggctgagtagaagcttgtcattatagagggagaacatcagaagtgtggacaacagcttgaataaccttgaaaggacaaaagaggacggtctgccctggaaatattaagaagtctcacatgattagacacaagatattaggggaaaggcataaggtgaattgagtcaatgaggtcaaagagaagctagctggaggaacaggcgatcataaaatgagtaaaagtatatattcaaagattctttttagaagggctacacaggatggataaggggagagagagagttgaggcacagagacaaattggaaaggtgcaatcataaccagagacatgaaaaacccatagaaatctgatgtagattatgtggtccccaaggttgaacaattaagtacgctttcagttgttatgcccatgatattaacatattttataactgcaataagtgctgaagctaaagataaatacaaacaatgtaattcttattctgtgagaaaatgttgtagctggaagttaaacatgtttcttagctaaagaaaaatattgtgtgatctggattacttaatgttataatttagcaacaaaatgttgacattgagccttgcataatcaaaaaagtagtctattcaataaccacattctcagaaaaaaaacaagaaaatattagaaacaatgataaattatcgtagtaatttaattcagtattctattgttttatttggatttaggaaaggcagaaatgttgaaatattaatatatatccctgtaataatataatttgtgtctgagaggtaggaatgagggcatgaggtcaaagtttgataatgaacttcaaagctataactatgatcaggaaattaaaattggacaataaattcctagaatcgtcaggagttgcttgtgaaatcgagaaaggaaaggatatacacaaaaataaagaacagccaatgctctcaaaggagtctaacttttataatagtcttctgtgttagagctgaactcttctggtttagaaggacactctgttgcctggaaatagggcatggaaaaagtcatcagagtcatgtcatctttcattcttcccatgaacgaaatcgaggccctgaaaagtcacctgtgtttgctgtattttattgcaactaagatgtgcatttttaaattgatacataataattgtacatatttgtgggatacatgtgatattttgatgcatgcataccatgtgtaattatcaaataaggatatttctgtatccgtcacctcaaacatttaccattgctttgtgttgggaacatttcacgtattttattatagctattttgaaatacaaaatagattgtcattaactatagtcaccctactggatgcaccttgtttttaatatttctgaaaacagatacgtctcataggtgatggtgtcacagctgtgcattagttattattgcctgtgcaggtgcaaacgtaactattcatattgttgtcaattaattaaatagttacatttatttatatgcgtttattatactaataaacacaatattgagatagttgagctctagttttgactctgctgttaactagctgcgttactttaatttacttaactaatttggctttcaaattcctgataagtaaaattacaacatgagtttctcctgctataatagcctgagaaatcggtgaaacacatgaattcagatgttgatgctatttaatagcgggattccagatatctacttgccattatgggagggagagaggaggtggactggaggctgtgatttccctaggaggttgttaaaattggccaggtgaggaaagctgagacagaccataaatatgaagcatgatacctagccctcagtgttgaaagaaaatcaaatctcatctttgtggtctaaatatcagtatgatacaatcctctgtgtagacatatcctctgccctattgttttctttctaaaagctaaagcccaggtgtgatcacatccctccgttatttacaaatttctgatgatgatgattcttctaatatctacattccttaccattaccatgatgtccaaaacctattataatctattcgtctccaagtgccatgttgtggtcaccctatgcaccctctaaacccaccatatgaccttcccgctgctacttgaatacagttggccctctacctcgttgtgtctttgcattgcctatttaattgcctttccattctctaaatcactctttcgctggaccagcaacatcagcaccatctgggaattcattagaaatatagatcctcaggcctcatctcagacctgcttgatcagaaacattggagagtggagatgagcagcctgtatttttatcagccctctaggtaatttgatgcacactaaagtttgagaaccactggtctagagcattcttctttaactctcttctaaaaattattagaatgaattcgagggacgggatctccttgaaagccaagaacatttctttgtcatctttctgacttcagggcgtagtacactttttggcccataattaaagctcgataaatgcattctatgccaataaatcagctaatcaaatatattattcatgcccttgaggtatctgaaatttgtttgcagaatgtaatatataactatagagtaacaagagaataatttattgccatagataataaaacaatatcctctgtataataaatcctagcctctgctcaatgggcaaaaacgggactggggtttcagattttaaaaagattattggtaattaaatcacctggagaagcacttgctgcagagatgggacttgaagcatcataataaactgttgtttattatgattcggtcagagctgatggaatcacagggattgtgtgaggtatggaaagtggttgacattgaattccaggctgcacagttgggacttgatatgataaccaaaaagaaagaatgtctggggtggtagcaagctctaaatttagacaatctaggcttatcctaaggagaatatagatacagataactgaagtttgattaaagggaacctggtgtatcacaaatagtaaaaagctgtagttagtctatgcagctatcagctagccacataatacttttgggcaaatacattataaaccaaaagaatgacatggcttatctctgtaacaaagtggctcattgttctttattctactgttatccttaagaaaaaaattttagtaaatttgttatgctatactcaacttcaagaagggatagcgcttataaaaaaattgtttaaagaaacaggcctatttctctttgggagaagccacggagaaacgaaaagaatggaacgtgtgtttctgcccagatggcaataaaatgtagggtaaatttctgtcttttaaaactgtattttttccatccctctgtatatacacatatcctaggactgttataaaatgctgcatgcgtatgtgaaaatggaaccttattgggctgtttgatggacctttaaaatatatttgttggtttggggtacatactagctatgcaatataatccgcattatttcttatgtaaacaatggataaactgtttcacagtccagacatttatttggtcactgtttgtagaatgtctattttatttacttctgaatttgtattccagagatctgccttcaatgttggatacttccactgtaatattctaggagatgctcactttctttttcagcatctgacacagtaccatctgcctcctcttttcttgccacaagtaataacaattttataaaggaggatcacattacagaattataggtggtaaactttctaccaccagatttacccaagaacctgaaacacattttttcaaaaggaaatagaatgtccttcttgtgactacatcggaattttgcttgcagcattatgctttttttttccccctagtgtagctagccatgtggaactgaagccattagccagctcctcatcctataaatgctattacctgggaaaagaggcagaaaatatactctcttctccagttagagtctaaaggaagagaacaatatgggtagttgtgtttaccacaaattgatagaactcctttattttaaatgctaaaaccaaataacttgtttatatgacttcaacattgactatcacacactgttgcatgataacagagtgaaaactacctctattggatttaagtggggaatctatgtctcattctcattctttttttactgtggaaactagttgattccaggatcagccttagctccaacttgccacactttgagttttggtttttcacttgcattgtcacaggaaacttctataggataaatcgaggaagattttactctgcaacgtgttgcagaattaaacatttaaagtggcaaaaccttcgtgtgtaggttgtctccccagagaatgtaaaaatgaattgaaggcagcacctaataggtaaacgacagccaatcaaacaagaacaaatgaaatttgactggcaaaatcaaattgaaaatgtataacgctgaatctcagaatataggaggatgcatagaaactaagctgtactattataaaagtcatagccattgaaaaataatgactggttaatttggttttctttacctcatggatgtgaatggttagattttgatgttggtgttatttgacgtgtgtttgtcaagaagttgccttagtcggctcgcatttaggataaaaaaaatattttaagaaatgtttaagagattatgttggagacattagaaacaaaataattatgcagagggcaggactatcaaaatataatagaaaaattacaccgctcttttatgatttcctcctttttggcatttaacacaaaactttatgattacacacaccacgcactccagaaatgcttaaaggaagatgagaggaaaattcaatagaagtagcaggcatttctgtgaggacagcagaatgatcacttcatctctgtattttttttttttcaaatttctgtatctgtacaatgtcttttccagctctaatattctgtgatttggtaatttccgcactcagattttctttaatgaattttgtatgatattacctatttttataccagatattacctggctctaatttctttttcaccctaggaaataaaagtatcgggtgaatttcccattttcttatgttattgatacaggtctctgttggatatccccacgattaactttcctgcagcatgttcgatggtggcttaaagaagaaaccatgtatcagagccccttgtctatatagacttttagataaagagaaatacatatcacagaattattctgggcgcatagagtctctaaatgcaaaaaaaaaattgtattgtagctgttgattcttctcagatagattgagtgtagagagagagcattccaaaaactgagcagaagaaacacagtctgaatcaaataacatgaaattttagctaacaagtaaataacacttttttcagaatatgcaaataatattggtttattatgaaaaatgtataggctgatagatgagcatagagaaaaaattataaatatcttctttaatatcactttccccagcaaaccacttttaacattttgatacattttcatgttcaaacatttcctaatagtcttttttcctgttatataaatatgaattttaaacattcgtatgtttatgaaaaggcaataagatactgctcttttataacaggctttctgaacttcacaacatgcagtgtattctaacatgctccttgtgttcttaactaataaaaaacctcacgttatttaaaaaaccatcttaaacataattatccattaagagaagaggttggggtagagagtttcagactatcaatatcaaagttatattttctgtaagtattttaatttttaagtgtagctataggtatatgattataaaaccaatagcagagaaaagataccacctttgaatatagttttccttggttccatgaaaatggcctcctttctttttgccagtccctcagtatcattaactcatttttctgtaaatgccatcattgtatcacatgtcctcaggaaaaggcacttttctcttttaagctagtgtttgttcttgttctaattttatggcaatttaacgagtaacaatcctgtttctataaatactgtttcctaattaatctattgcattctatccatgagaatttagatgactttctttgtaagagaaatctctgtagcatgagattcttctttgctcttaaatttcattctttcacatttttaaatgacctgatagtattttgttgtatttgtgctgattttttttaaccaatcttaccttgttgaacatgtaagttgtttctaatatttgcaatgatcaaaatgtggatccaacttcactaaagcgttaagaatctaaaacaaaacaaagaacaaaaagttggctgtcatcttgcttggaccaccccgtgagttactattttcttgtttccggtcacagttcatcctaaatcatttcagtacacaaaatgttttttaaagtttgggacagggggtagagaatgtcaattattcctccaaggcagtcatatgagcattgagtatcatgtggaatagttgttacttgtaaagttatggggcatcaaacccagtcaatatgtttctggaattgaaaaagtccctggacattctaatgatactgttgttcactttgcacctactgttaccactactttgatctgtcaacactgcccgtaatggttaattttgtgcatcaacttgactgggctacaaggtgcccagatatttggtcaaacattattctgggtgattctgtgcaagtgttatcagatgagattaacatttaaattggtagactgagtaaagtagattgcccttcctaatgtgagcagacttcatgtaattaattaaaggcctgaatagaagaaaaacactgaccctcccctgagcaaaagggaatcgttctgcccgactgccttcaaactgggacatgggctttttcctgccttcagactttaaccacaatattagctgttcttgtatctcaagtctgctctacttcgattggaactacactatcagctctctcgggtctccagcttgcttgttcaccctgtataccttgggagttgtcagtctccatagttgcctccataattgcatgagccaatttcttaccacatacaaacacacacagagacacacacacacacacacacacacacacacacacatataattatatatgtgtgtgtatacatattctcttattccttttgtttctctaaggaaccctaatatactccttattactctttctactgccttagagatcttcaaggccaagagcgtaatcctccatcctggctctttttcctaatcattaatgatcaactcatagccatttagctcaactaaaaataatttgttcatgaagctttacactcccacatactgaggaacgtggtacctaagatcaaacagtcactgcctcatcaaatgcattcctcttcaaccccatacaaatgtccccagatggaactcacaccataaaaatattagatcccattgacttttctgctttctcaaggatcattgcagagcttgaaaaagatggctcctccctttgcctaagcaggttaacttggtgtaaaagtacatgtaagatttggcacaaaggaaaataaatcagttttgcctgggtcctaagaaacatttccctctgcctcatggtaattgtacctgccagttgattgcattactcaagtggagaccatgaagtgaagtggtagaacaagaagaaatccctataattttattaagtatggtgaaaaatacagatatgtagagaaatgactgggattagatggagcaaaacataattcgagatcctgatacaaattgtacttcctggctcaagggagggagcagaacattccctgctacatgggaataataataaatgcctgataaaaatgcagatatatcatagactacagaagctgaagtggattcttatggtcccctactcagacagcctctccttcagatgaagaaactgaagcacagaaagctcatcctagtgtttcatattgaaaaacccattcaagtctattttaataacctgttaccaaaaatgagggaaataatttaactttaatgtttcactttgcattacccttttcctgactagacttctatccttttcttgagttgagctcattaactactatgaaattatggttatgggtagaggttaattttatacctgtccatcttctggcatcttatttacactaaaaatcatttttaaatggcttcattttaaaaaatattatttcagttgacattttaaaagacacatcatttatgtactacagaatatgcattttatactctcctttattaattttattattttccaggtagaccaatcaaatgaatcagaaattcttggttagatctattagacagcataagtatgtttttcatcattaaattaagatgaaaacacaattttactttaaagtgtttgacgtttccagcctttataaagtcaacacttaatcacatctgaaatttgcaggaaaaaattttgaaagccttcaattattaacattatttcgggagaaaaagccactttgccgcagaactttcacttttctctcgtgaattaagtctgatacaaattattcattatggtgaagtttaaacataatagagtctagctacttccacaaaaatactattcaatgagtttctacattgacatctaactgaccttgtaattaatgttgtacacgatccttttattatatgctggattatcaaatatgacttattagcagtataaagacacaaagttctgaaatgtaatttatagccatgaaaaggaactgagctttgtgtgacagttaaatttgaagagatcaggtgattattatgaagcatgaataataatgcatattaaactcacgtttttgtttaaatcattaatatgattgttttagaagaaagtctacctctatcatatgggcaataaaatgtgtataagagcaaacatttgtgtatgtgaaataactcaaattaaaaccagttttccacattaattcttacagtttttaaaatttaaatcatttaatgtatcacacatagctttattcattttaagctataaatgttacaatttctgtttaagctgttaatataagctttgtaagagcaattctgtataaatatagaattgtcattattcactaatagctaccatttatttagtgcttgttgagtgcaaaagtactgcactgagatctttgcatatgttctcttaatgttacaattcttacctgaggcatttctgtttctgctggaatatggtctctctgaattgaacaagggaggcatttttggttgttatgatgaaaggtggacactgctggcactaacgtgtgttggtaagcgactagactcttcatgatgcgtaaacagtgtttcctcatacccctgcacattcaaatagaggaaaaccttgtttatagttaatttcccctagaatgtaaatccatttaacatataaacacaaagcgtgttttgtgtggatgttttttactggagcagggagacaggagaggaaatgcagttttgatagttgctgaatttttcaagaatgcagcaattatagaacaatttctagaagtttcctaggagctcttttccatagcagaaaactaggacttaatagccttgcgactcatggtacttgagtgttccatacaactcacctatattcaggggacatttgaaaaattctacattaaaggggattcttaacataggcgcaagtgtctggcatcttcaataggtcttctggtgtggccatgaaaacattcacacgtttcaaagtattttaaaataaaataaaacatatattgttgtgttatgaattattttctttcttttttatatgatggttagatcactgtgcagacaagtttatgagatctattcatttcatttcagggtggtaaatgagggtgttactaaatgttggttctaaaaagggagacattgggtattacagaattcagaacagctctaagccctgtgcacatttagcattagaggacacaggcaaatctggcctccagtcctggcagcttcttcactatgtatatgatgttgggtgggttgctttacctctctagtttttacttttatttctaagctagggctattcatagttctttatcatgtggttactgtgaagtagcaaagcacctgacataattagagcagataaaatgctcaacaaatattgcttatcagaaggattatgtattacctcccgaaatacatcaaaaatatattttccaattcaaagaatatgtagtacaaaaatcatgcctaaattaacagagttgcagtagcccaaggagagaagataatcattattgatttcttcttcctttttgctaagcagttctctgtctctgcctcctcagttgttgtccatcccactcccccactcccaagccctgaactctgaggggtttgctgccgtggccggttctgtagtcattgctgtccaatgatgaaaacacaaaatactgcaacagaacactatgcctgtcagcttagctcccttctttctgctaaatgacactcaatcctattcttttgttctaaaggatatcctaaatgaatagccactggggggaaaaaaggttatataagattgtgcactgtgtgaaactgatgcaaccagatcaatgatgtgaatttctcttaactatttactgggatctagaaacaggtctctcaacttagcagtgtttacgaatataataggccttccttatacatacatctgaagccaatctgagtcaggaagagtcgtggtctgataaatattttgaaaacttgcatttgttctattaaagcaaactgtttattaatagtgtgccttattttttaaagcaaaacatttataaacagtagtcattacaggcacttcagtgtacggagtgatcaattgttagacctttaggaatcgattgtttcgtggagcttcggcttataattgaaatgtcatcagaaggagtgtaagacatagcttcaggagaggccatttatgcgcttttgttttcagctaagttatagagtcatcatgtgaagaaagattcttctcttagtaaaaatcctttaatggttggaataacacttgatatttaatatttctttctactttatatccacatttattcaagtgctaacgcgtgtggggcagcaatgaagcactttattccaacattatagttctcatatctgcgtatgattatttttcatttatcgttagcatatatataatgatgacttttaaagtacactgtattatattcactggaataatgattagctattaataatttgaacactatccaggaaattactgaacatgtcctacaagataaacctcgtatgatattgtctccaaataacagtgctaaccaagaagagtgctaccaagttcaaaagtaatcacagggagtaacctaaatgcagctccgttgggttaaaaatagtttctctaaattatatgttccctaagtttgagatcgatttctacaaggggataaaatgtttttataaattctcagtgataagtcatgtgattaagaacccccaactttttttccaaagacatttgcatctctgatcaaaataacaagatccagtcttagttataaattggggaattttcatcaaaataaggagctactcgttgcataagaagactagtacaacttaaagccaatttaatttcaatgaatgcatgatcagctccattgccaattgagtgtttttcttattcatcagaagatgggttcatcatcgtgtttcatatcaactgttctcaaaccatattgcccatttaaataaatatagatttgtctcgaaattctaaattcatgtcatatttcataaatagcctatggtcctatttattactttaaaatattatagatataatatttttattctaaagtaactgtgttatacaaccaaattattcatttaaatatgtgactttttaaataagtaaatgacttatttaagtaaagtcattaaaattttccagtctgtccttcatccacctgatctttgaatgagttaggaacaatacaggaaactaatacaaacttaattttgattacaaaagatgaaatcattctgttatttattcaacacactatgtgtcaataaaatcttatactgtgaaagaattcgtctaagtccatttgctgttgcttgtaacagaatacctgaaaatgggtaatttacaaagaaaaggagtttacttcttacagttacggaggctgagaagtccaaggttgaggggccacatctggtcagagccttctcccatccaagtactaaccaggtcgaacctcacttagcttccaagatcagataagagtgggcgcgtttaggctggtgtggctgtagacttgttagagcctttttgctcatggggacacagcagagccctgaggcagtgcaggacattacatggcaagaaggctgagtattctaatgtgttcatgtctctcttcctgttcttataaaatcatgaatcctactcccatgataacccattaacctattaatttatgaatggatgaatccattcataagggcagagccctcatgatgcaatcacctcttaaaggcacaatctcccggtgctgccacgttggggattaagtttccaacacatgaaatttgggggacacatttaaactatagcaaaattgtaataaaatgttatatagaagcaatgttcttactgattataattgttatattggtaaagtgttaagtcctctaaccaagggatatatttcagcttattataatagttttaaatttacaattcaatatgaataacatctggtaaaagttcttttcaagaaatgggaaaattagaaatgtttagaagaaaataattcaataaatattaagttcaaactggattcatagtttatgtgaaattctgggaaccaattgcaaggggagaaaatagttacaatagcaatggtgaggatgagaataagagcaggtatcaacgttaattgagggtgtgttatagttctaatcgtgctatgcccactacatgacttttccctgtgtgaggtttccgagcttcttcgtagtaatcctaaattgagctggagagaggctagggtaacttactcacgctcatagagccatagagtagtaaaacctgtatttgaactctggcctgtctgacatcattctgtggtcttttaaaccaccactgcttctccatattaaaactccaaatctaggtgaaaagaagaaaactcagaacatgttctgcaacaaaatataacaaaatataatgtatataaacacttatacataatatcactaatatctttactatgaaaagactctgatacgaacattttacataattcatgcagaagtgttaatcacattgtctgtgatgagctgtgtatgtatctgataaaattctggcaaccagacatcaactcgtaggcatagatctgtaacactaaatatttgcctcgagaaacttaaagaaataaagacaaatgaatgaataggaacatggaactgagtacaagataaaatcctcctaaagcaatcgatgtacttgctgctgcgttattgttctaagcaaaagaagcatggcgaagggagatgtgaagctaaaaacagaatgcttagaaggagatgatagcaggagggaagcaaagatgggaccaagctcccaaaaggcgggctttgaacaaacaaaacagaaagctaagcctttgacggatgcacgggatgcaagaaactttagtcaggaaagaggaggcgaagaaaaaccctccaaagaaaaggtgaacaatattttaataggcaaattgacagatagcaagagatatataccatgctatgttttctcattgcagctgaagacaaactggggttatttatgctttgaaaaagcgtaaatctaaaaaacaattgtggaggaagaagcgatgaaaacacgtgttaatacagaaaacatggctccaaggctttaaacttccttgtgagataaatgcatttacattttccgtagtagctaatatatatatatatacatatatatatatatatctgggaaaataatacacagtgattttctttctttttttcatctacttatgtgagaaaaaagtaggctatctgaaagcttttcagttaaatgaggaagaaagttaggtgatcttgtaaataatatatatgttcaagataatgtaaggcccttgtgtagttttcaaaacttatctttaatagcagtttcttctggggatggggtagttcaaagttgaaatgttagaaagatgttaactttttttcctttttacttctccctttcaggatggaattaacaaatttgattacaaatagatctcagagagaggcaaatgcattgaatccagaagtaacataaaattagatcatgtttagttatgcccgaggtcacatggtgataaaaatgaggataaactgaaattgtctgtgagccagattagtttattttatgccagtcctaggaaaaagacacatcatggtaggatacatcctttttttttttaattatactttaagttttagggtacatgtgcacagtgtgcaagttagttacatatgtatacctgtgccatgttggagtgctgcacccattaactcttcatttaacattaggtatatctcctaatgctgtccctcccccctccccccaccccacaacagttcccagggtgtgatgttccccttcctgtgtccatgtgttctcattgttccattcccacctaagagtgagaacatgcgctgtttggttttttgtccttgcgatagtttactgagaatgatgtattccagtttcatccatgtccctacaaaggacatgaactcatcattttttctggctgcatagtattccatggtgtatatgtgccacattttcttaatccagtctatcattgttggacatttgggttggttccaagtctttgctattgtgaatagagccgcaataaacatatgtgtgcacgtgtctttatagcagcatgatttatagtcctttgggtatatacccagtaatgggatggctgggtcaaatggtatttctagttctaggcccctgaggaatcgccacactgccttccacaatgaacagacacttctcaaaagaagacatttatgcagccaaaaaacacatgaaaaaatgctcaccatcactggccatcagagacatgcaaatcaaaaccacaatgagataccatctcacaccagttagaatggcaatcattaaaaagtcaggaaacaacaggtgctggagaggatggggagaaataggaacacttttacactgttggtgggattgtaaactagtacattcttaacatcaatttattcctaaaagcaatgttcatagggcacactgtaggccatagatttgcctcacaaatttaaaggcctaagccctcaacatgcacagcagtatactcagagactatttgtaaagatgacgattctggaactttttaatgaccccaatcattagcaatgattaaaattaatattcaacattctatatttaccaaggcaataaagtagactaatctattttaaaagggttttaaaatgaagagatgaaacaaaccaaatgattttgatttaaacttcatgaaaacataagttgcattaatcaggtgattttgttttatgagcattctgattgaagtgatcatatttagccccgggagaataagagaaggtaaagtatgggtatggcactgaatttactgagatgattatattgtttgagttaaagaacttgtattaagaaacaagtatgtgccaaacattgtgctaggagcaagcaatgctaaaattacatgggtagaaagagagaatgaaatatctagaatgagttagaaacatcagtgttttccaatgtggagccctgacttcacatgaaaattctcattttcaaacaaggtagtttatgaaaactggactattagcaagacagggtgggcatgccatcagtatagtacctggtgtaaaactagaaattttaatcatttgtgctttcattttataatcagtaaaatccaaggtaggacaaacttttactttttctgtataatggactgatatttgaattatacccaactttaattttttgccagaaattatgctttattgtttctctaaaatggtactatagatctttatttatttctatatatttatatgatttttacatatatgtgcatttacatgtatatacatccataaactatatacatatatacacataaattacaaatatgtgtacctacgtacatatatatgcatatatcacgcaaatacaggcacattttcaatacccctttttgatttttttccttgaagagcatagcatctgaatttattatggatttatttttaatttatggtcatgttctttgagtgcttttggtgtttatctggttgccccaaactcgctagcattgtaaagaagatgtgcaaagcctgaatctagactgactttcatattgactttattagtcaaaaaaagtagatgaaaatgtaacagtccgtgttaaaaatgggaataagacagatgttcaagccctagcttcagcagtttttagctgagatttactggaagaaaacattttctgaactgtaaaacatgcaaaatgcctacgtgacagacttcattaacattattaaatgctatgatatagtaaaagaatttgtaaactgtcaagtgctttgtcaacattaggaatttagttattataggtatttccatatacatgttgtatttagaattccctttaattttatacttagggttgatttgtattttaactaagtcactttatatatctggtcccattatacaagtatacttttccttaggataagaaagtgatctttatatatgtttatcaacccaaatgcccatcagtgatggactggataaagaaaaggtggcacatacacaccatggaatactatgaatccataaaaaagaacgagttcatgtcctttgaagggacatggataaagctggaagccatcatcctcagcaaactaacacaggaatggaaaaacagacaccgcattttctcactcataattgggagttgagcaatgagaacacatggacaccgggaggggaacatcacacaccgaggcctgtcgcgaggtggggggcaaggggagggagagcattaggacaaatacctaatgcatgcggggcttaaaacctaaatgacgggttcataggtgcagcaaaccactatggcacatgtgtacctatgtaacaaatctgcacgttctgcacatgtttcccagaacttaaaatttaaaaaactttaaaaaaagaactgtagatactgatccaaaaaaaatgttcattaatgggggttaaatgattatttctaagtagactactcttgaacccttgaatctttaagaattttctttgctattgaagccattcaaactctattttattaaagctgtcgttattctagtagattttaaacagtaatacctgaatacattagaaatatgcaaatctgcattacatatggcatctgcagagcagaggagtttggtcatctggactcatgctaaagtctccgaaaaatccgcttgtcttaatgatggttgactcgctaatgctatgcgtatatagtcttattttaagtgattgaatgatgtggctaataacccctctgttagatgcactcagaacctcacctacctgggtcctcagctctccagtgaaatctctactttaagtttattttctaacatggtaagagccttcagtttatgttatgctcaggcccgtcactgtgaataaaatattagaaatggactttttttttttgtatttttttaatggatcccttggaactttaaaaaaattatttatttgagctttctactgttatcacagtgtctcctaagcatggcctcccgttttttgttggtaatataattcttacgttattcaaattagtaaccattatttttctcatggctagaattctggaaactattaggaaatcactgagcataattgaatggctgtttatttgaagagctatgtcaaggcagcatagagttgtattttcttgcaggggctctggagtcaaagagcctgggttcaaaccttggctccaccactttctatctgtggggcattgggcgtgttacatttgtgaaacttttgtttctccatttgtaaagtgaggtttgggggatgattaaaccagataactcatgtgaaatatttaatggaaatgtatttggtaggggatttattatttttaaatttggattgcacatgacacatgtcagggatcatgctatgcattttggatagaaagatggctaagatatcatgcctgactcttaaaaacttacctaatggtaaatgacgagttaatgggtgcagcacaccaacatggcacatgtatacgtgtgtaactaacctgcatgttgtgcacatgaaccctaaaacttaaagtataataaaaaaaaaaacttataatcaactgtagtagaaagagatctgaatggcttgccatttagctaggcacatggtatatgtgcttaattcatactagcagccactacagttgtcatgattaataatgagcttccaactgcacagaatgcttttaatccatagaaaatcaaatcagaaacaagtttttgtaaaattaatgtgaaaggagcaacaattaaaatgcaagattgacatttattttctaaattggttctattttctttcacatttacaaaatttataagaaaattctttatttctatgtgatataaagaactagaatgtactttgatgtgaattattgttgccagtgctgttcaacttttatccataatttactaagcacctacatttagacaaaggcattatccatccctttggggaggatttcagatgattcatacacagacctggtctcgaggaatttaagattttctttggggagggaaataaggactttaaccaactcaagagtacttagagaattttctgaaaataattttatcaatgaaaacttgttatattaaaagaaactgtcattctgacttccacaaatctaggcttgaaactatggataacgagatattttctattactctcactcacgtcattttcacaaagtgaaaaggtacattttaactagtgaaagaatagaggaaatggaagtagctcgaggcagtggacgatgattcaaaaagacagggccctattatttgatcaagttatgcaacgactctgggcctgtttcttcacctctggaaggaggaataatctccaagccctttcagactcttttggtaattcacctccagcacatcttctaaatgccagcattaactgtcctctgatttgtctcatgtttttctagccccatgctctcctgttcgccatttaccctcatgcaaggtacaaattacacccatcatcacaagacacttgctcaagtcccattgcccccttgaagacctgccacacctactctctcaaaaaccatcatttcctgaaagtcctatacagctcatttggtatttacagtgtactgccacaagccactaagcatcgttttgtgaatacatgacttacagacttagcttgagtaaagatacttgaaaatgaacaccatttcttggctatcttcctattttgatgtacccttcaggcctatgaattttagtataatagataaccaataattatttcttggttctttcctgcacatctgaataaccctatgcaaagtgatagaatgtttttctataaggaggtcctacactggagattgtgtatttcttaatgctgttgaaggaagagatgtgtatctaaaataaatagactctaacaaacattaatttatatttctattatctgttttgtgtattgagatatctcacaaaaataactaaacattttggcattattgatattacatatttgccatgaatatttgtaaatgaagaaaaatatatatacatcagtaattatcttggcaaactcttcaattatgcaatattgttacatagattacatatctaagtgaacactggagttttaacaatattgtgtgttcataaatgttttatttattattgccactaattcttattgccatttcaagaactatgtataagttgttctaaaaactattaaagtataggtgaccatggtcactactgcctactttggtaaaggccaaatatgtgaagactttttaatgtgttaacaaacgttgaaggttttttaacctgttaacaatcagtaggactcttgaaattatttcctaagagagtaaattttacaacttgcaaagcatgattaacctcttgtaattataaaccatctcttgtagttatgtagcattttgttaatgagcaaagaaccattgtggttcctttttacatttcttaaaataattctccgtaacctcattgatatctccagtaaatttagataagcttttttttttaaaggagggttaaaatgacattttaaactaatttttcttgttagttatacagagttgaactatctgagggttttattgacagtcataaaaaatttgttattttctgtgaaatatagagaatttaattcattatcatattattaattctgtgggccattgtcttaattctagaggcacaagctgttttcatcccactgaaatagaggaatcaaagtatgttccttgctcaaagcacaaaagtgacatactacatagtatgcttcttgagtagtcgtaaatctcatgtgttaaattacatcccaaagatttcagtatgttttatgactttaataatttatggtaatttctaatctggcctttgttgacctgtcttgctttttaaatttttagtttttcgacaaaataattaacatattttaataatcttccaaaggtgtttaaaatggcattgtatagagatagctgaaggcttttgagcttctgtgttgtaaacactttcttaataaaacatgaattgctaccagatgatccagcaatcccactactgggcatttatccaaagaaaaggaaatcagtatctttgaagagatagctttgttcccatgtttactgcagcacttttcatactagccatgatatggaatcaacctaaacgtccatcagtggatgaattgaaaagaaaatgtggtatgaaacagaaattgctgctttaatttatattaaacacactcatattcttctcagctgttaagtattgagttatagatttaaagaattctattgtgaagactaaagtgactattaaagtaagaaattattttttccattatatttaacttatttcatactttaatgttagcgccaatgagcaagactattgaatacaaaaactaattaagtagtggtgatagtacagtatataagggagaacattcttttagaaaggaacaataacagggagcaatagaaacaatgaatgagtgtaaggtcacttagtgttaaaacagctaaaatatagtacaaataagttgcgttttaatagtgattttatataattacaccttgatgttttatttgttacaagaattgtccaggaagatttctctaaagaccaaaggcactcttcccctaaataactccaaagccagtcctgtgtttctataaaaaaaaaaaaaaaaaaaaaaaaaaaaaaaaagtgaaaataacgtgatgaacatttttgaggaagtataaaaccaaaatactccactgcatagctgtttctgcaggtattgtattgatatattacattattcagctttggagtctccacatccaatgttacatcatcactctaaattaaacatgtatagataaatgaaataaatgagatagcatatgaaaatctcatagcccagcccctgcactatttaaaatagaaataccaaagaattgtattcctcatctgaaagctatttagtggtggtgtttcaaataaaaattccatctactgctgttgcttccattgtatctttttctctgcggtactgaaagagaaagagacccagaaggggccttgtctgaagtgtccctcttttaagctgttgctgctttaagcacagggtggacaaatgtaataggagtttcataaaggtggaataaaccagcggattacggtgtgggtgaatactttcagatgttaaccaggagctctgcttgcatgctgggagttgcccatgcctcttctagattgaggcacattatcatgcacaacctaactccaagaaatcttttaaaccactggaaattgaacccagaacatgtctctaagccagccttttcatcctgacaccgaatcatagcatgagccagtctgtcagggatgctgctgctctctaggcaaattttaaatgttgaaataatgaatcatgttttcttgaaaaccatgtacaccaaagaaaagttagtcattttatagatgatgaatattaacattttcttagacaatctgataaattatcagatctcacttttggctctttttaagacagttatgcctcagaaatattaataaacccccaagcccttatactgatcagtatgttcactactagctatgagaaattcttgaagttcttgtaattattgtattatttccttactttcattttattagtatgtgaataatatttttaaaaattctagtgtatgtcttgtatatattttaacaacatgacttttaattaatgtcttgataacatttcttctagtgtatgttttcagtaacatgattattaactgtaactttaaaaacctgtggattagatgggaccattttaaaatgttttaaacctggaaaatctgatggctttaggtttagttcaagctatagatcacctgtggagaatggaactgccaaaaaaaaaaatagctgtagcagccctttgagtattctaaaatagggatgttatccagagcattggtttctaaagcttccattatttattgatgttgagctttcaggatttagctacaatatttactcaacatctaagccatgcttttttatcagtcatgttttatatcttttataatcaaactgcttatcactgaaaaaaatatataagtttctatgtatctggaagaattctctggtgtttcttagatatggattttgatgtgtggaataagaattcaattcaaggataacagagatgttgtcctgaaaaaaatcgaagaaaatcagcttttctttaacattctgtcaaagctcctgactattagtttatcagcactgttttgccaaaggtgtcttctcttctcttctttgaaaaaaatcatctgctgctgctacgccgcaagtgtgttcccgctgtgcctgagaagatgtgtggcataaaaaaatgggcatggcctgagttaaaagtgctacatttaagccagagctggcttatttattagttgtctaatcataggaaaatgacagagcatgcttttctcttgcaatatccgttgctgaaaattaaacacatgagcagagctttcagagaggttgactggcctctcagacagcacctcataggatggcctgtgttgaagcatctcctttaaccagggtctgtccctcagcattgggttggctcacctagattggattgtcccagcagaaaaaaaaaacccaaaattcagaatcatatccaaaccggaatactctttcattcacattacttgtactaccttttcagaaactggatacctgagtgtgtgagggtaacttagaaacttatctcatggttagaagttttagaattagagagcgatgatcatgaaacggacttcatgatcagaagcaatggagcaaggaatgagatgtctttgaggagtatttccctgaggctgtggataacgctgacgaataatccccaccttaaaagtgggttgaccactctagtagctgtaaggtgggagggttctttcttcagagataaatctgtgctcttcacttgcccatttcccaggttttcatgtaggtagaagaaacacctgtaatctgaagacactcttccttcagctttgttagtgacagggatttaaatatgtctttcacacattttccttagatagttaaatttcacttttcctgtttgtttttctctgaaggtattctaactcccctcctaatggacttctagagctttctaattctatgcaatttctgttgatttgttctggtaaactttgaaggtaatctctgattcaacttcttggagattctatcatgtcatctctgtttattaactttatgttactcatggtttcttgatgaggactcattaaacataatgtaagtagaaaattattaactacataatatttactacgggttgttatttctgatagtagctagctgtaagattccaattgttcttcaaatctttgtctcagtgatctctgtgtagttcttgactacttcaaataacttcctagaaggatagggatttaataatctcttaataggaacacttaacacactgctggtgggaacgtaaattagttcggtcgttgaaagcagtgtggtgatttctcaaataacttacaaaagaattaccatttgacccagcaatcccattattgggcatatacccagaggaatagaaatcattctaccataaagacatatgcacgttgtgtatgttcattgcaacactactcacaatagcaaagacatggattcaacttaaatgcctatcaatgaacagactgaataaagaaaatgtggtacatatacaccatggaatactatgtggccatgaaaaagaatgagatcatgtcctttgcagcgacatggatggagccagtggccattatccttagcaaacttatatggaaacagaaaaccaaatactgcgtgttctcacttataaatggaagctaaatgatgagaacatatggacacaaagaggggaataacacacactggggcctactggagggtggaacacaagtggagggagaagatcaggaaaaataattattgggtactatgtttagtacctgcgtgagaaaataatctttacaccaaacccccgcaaaatgcagttcacctgtatagcaaacctgcacgtgtacccctgaacctaatttaaaagttataaaataaacgtatcttattttcagtacaatacaccacagagtagaagggttaaaagagattgcttctgaggaggtgagatgggggtaaggacagcacaagagcattttggggggtgatgaagctgttctgtgtcttgcctgcgatgatggctacacgactaagcccttgtcagaactcacagaactttacttcaaaaggagcggattttactacacatcaattccaataacaaatactttgtctttaagcaaagggatacctaaatatagcgtattgaatggatctccagaaaaacacatttttcagttcatgtttcagcctaggcctcatctcatccaggaaaccttgtcttgcttgcctttacatacatgtggcaatcagtagtttcttttagggctcggactgaacactcaatgaacttcaatcttagcgcttgtcgtagcagattgacatggtttatttatatgtgtcattctctgtagtaaaaggaaaggatcaaggccattcacttttgtagtgattgtgcatggcagtatttggcacatagtagattattaattatggaacttctgttttcacacacacacacacacacacacacacacacacttcagagctattttcatttaaatatttgctttagtctccaaagcccctctgcctcaacaccaacccttctatctcattattcatcagcttttctcctattacgaaactacttaggaaagcccacttatttagcttatgatggcaaaaataaatatttgtacttttttttttttttttagtcatcgcttcatagaacagcctctgtcctctgcttatgccatgtctgaatatatgctggaggtaaaaagagttcctggttgagagcttcaatttgagaaactatctgagattactttccaggttccaccgtggaacctgtctgaccttgaacaaatgacctcgaacaagtggctgaaatctcttctatttcgtcaactgtaaaatgggggaaaaccatgtctatctcatggggttcatgtgaaggttaagaaattgcttattcagtgtttagcacagtgcctgatatgcataaagctcctaggaatattagctgttattgtatttccttaaagaagcccatagctctatatgccctttcattatatgttttagtagcccaatttaacatatggataaaatatttttaagttaaatgatttgctaatggattgttgaacgagtggcagacacccatattatagacgaaggtcaagtccataacatacagtacatttccccactttcatttcccattaccaaaattcattattctcctgagaaactcattatagaattcatgtcagattcatctgtgtgttcccagcagtgccttatatccagaaataacactgagtcattgtctagatgtagcagaggtggaatcctccaaagagaagcctcagagtggccaggtttgccaagtatagggatgccttgattactggccttactctttatgctcgtgaattcctaagttttattcctcctgtagtcatagattggcttttaagctacaagctgaagagagagaaaacctcttccacctcgttggaatatgtctcttcaatccatttgagccaatttaggacatgagactgctcttagtctagaaccagtcatcaggagaattccaggtctgattgactcggactagcgggtcaatatcagggcaaaaattccaacgcacaacacgatgtatcagtaaggagaacctcaaaattatttcttaacgtccagatcatgttcctatttttatatatctattttctcacataagtcattaaaatgatgtacctgtgcgggtcctttaatgatactcaaagatcttgaattataggctaataactaacttaataagctgcagaaattaacatttctgctacgtttatgtagcattttcccacatgtacttcagaggcttgagaaaagaccctgaaataatgactgaataacagctttactcacttaatttcaaatttgttaattcttctgggaaataccgtcaacatccattttattatttttctcaattacatgtacgtttctacatcagtggataagttaaggagaagaattccctcatgataattttttcatgctcgaaaattttgaatcaattttttattttacattatactctttcctagtcattagaaagggagtggtggttaagataggcaagaatgctttataaggatactactctcgtttcaattcttaacatcaaaaaccttaacagtgtgtagactataaaataaaatatctagggatcagagcattgtgctgaactttgcaggttttttagtcaataatatatatgacgtgttcacagaattctttgtcaacaaagtacttttggagctccaggccatttaagttggtttttgtactttttctttttcttcggaagactttttttgttctatttacctggaagtgtttcttttttggtactgtgaattaaaatgagaccaatctactaggcaggaaaaaaccttaattagattgttgacacagacaaataagaatgtcaattagcatctactgtcacatgcctctccagactgcttctaggatgagtggcctcaagcagctacatcatctttatactcctaaagcatcaaggaaacttggagtgacaattcatatcatgaacacatccacagtgatgatgattgtgcttcttcccccccacccaacaacaaaggatgaatgccaattaatgtattcagttttttgcgtcaaaggctggatcacttgtgcaatgagggtaatcatcctgaccagacaggccatacaatccatattgtgtgaattaaagataatatgcgtgaaacaccttactctggatgtggttcatagcagtagcaaaaagatgaaaactatggtatgctaacattttagagatctgtactctattttaaataattttataaaagtgcatatacaataaaaagtgcacgtatcacaagtatatgcctcaaaatctaaagccagtcatgtaatcagcatccacttcaagaaagaaaacaaaacagtacccctggttcctctttgcaatcattagtctcccaagagtaatcaccgatctgatctgtgacagcatagattggttttgccctactatatttttgctgaattatacaatatatgctctttaatgtctggcttcttagtgcattgtatttgtgtatcagctattctcttgtgtgtagttattaaacaatcattttatgggctgcataatattccatagggtaaatataacagttttattgataacttagctattacaaatagtgctgttgcagacatatattctattacatgtcttttggtataagaatttacacatttcacatgggtgtatacccagaactgagattgctaaatattggggcacattgtatacattttgatttagtagataagatattgccagatatcgtaaatgcacagtttgataaatatagagatttatactttttctagagaaaagccatcaatatcagtgtatgtgtatatatatacgcgtgtgtatatatacgtatatatatacgcgtgtgtatatatacgtatatatacacacatatatatacgtatatatgtgtatatatatacgtatatatatacacatatatacatatatgtgtgtgtgtatatatatatatgaaacaactcagaagcagaaagataccccatgttctcacttataagtgaaagacaaataatgtataaacatgtacacatggacatagagtgtgtagtgataagcattggagactgaagtgtgggggtgtgcaagggaatcagtgataaattaatggctacaatgtacataatttgggtgatggatacactaaaaatccaaagttcaccactatccaacatactcacataataaaattgcacttgtaccccttacattcatacaaataaaaaattatttaaataaaaataaatatgtgtatatgtatgcatacatacatatgcatatacatatgtgtttgtgtgtgtgtatataacttacacttaaaataagcatggatgctgcaatgaatgctcaatttacaagggttgtccatccaaacttgtggcaagtatctcacctctcaagttgttttcttttttcttcatatatttcttgcttttgtctaggaaggaataatttggcttgcctttcaagagtgtacagtcagcatgataacccaaacacttaagacacgtgctaacccatgtggatcccttgagagaaggaaaacagtggtccttttactgggcagatagagcccggggccaggtttcgtggcttgaagatttcagcttctctgcgcctctcagctcagtgcctctggaagcaatttacaacttgtgaggccatactcaaaggccctgttattaattccccgccttccgagaccccatttcagaggatctcaattgctctcagagtgaatttactgtttcctgaattccgtaatcccaatagcaggtctgttgtcctcattagatagcttaagttagagtcggcagtgtaattggcaactgagctactaagtatccaatgcttatgtggaaaatatgttccctattgcaaacaactgatattcatattcaatttggcaccatcatctatctataaagcagatactacttgtgtttattaagttttatcccaaataattattttagtaataatgcttgaaaataggccttggtcatttgcatgtctgtatatggcatatcctgagtctttgtatgtattagaaagatcactcgttttgacttgatggtttaataaaagatgtccctcactttgggcagagacatttgaaaaaggcactccaaccagggacctaagaggtgaatgagatgcagctctgaatcaggtcacacggcctcaggaaggaaacatcttggttttcacatccctcacttctcgatgtcatgtgcaatacacaaatgacccctcaacacacacacaggcacatacacaaacacacactcactcactcactgtattgtctctttccttgactaagtccttcttactaactcaagctctaaagcttttttacttacctaaggtgagtgtgtgaggatttgaggtttcaatattaaaattcagaaacatttaaagttcattttaaatattagtaaaaaaaaatcttgacaaaatacaattatagacaaaaagaaaattcagaatatttggaatttaaggttgaggttacagccctatttatgaaatattagaagaaaaatgctggagagaataaagcaggtttatgagtctgatagaaagcataaccagatgattatgcatatatttgcatatgcaaagctttctaggcaatctgaacatttaaacctacaaatgtggctgcgatgaacagccacagaagagcaggctagaacagaagaggaggctagaacagaagagcaggcagaagttgtaaatgaaatgttaattttcaatggttgatctcccaagtactggaacagatttgtgctgttttcaaggttttggttcaaagaatccagtagtgtattgaattgttttgtggcacttccctgttattttgctttgtaagctacctcaatccatgaagtggctatgagccccttatacaacactgttgatttttttttccttatctacgcaaaagatttttgattcagggccaggcatggtggctcacgcctgtaatcccagcactttgggaggccgaggcaggcggatcatgaggtcaggagatagagaccatcctggctaacacggtgaaaacccacctctactacaaatacaaaaaatcagccgggcgtagtggcatgtgccggtagtcccagctactcgggaggctgaggcaggagaatcacttgaacccggtagccgagatcctgccactccactccagcctgggcgacagagccagactccatctcaaaaaaagaaaaaaaaaaaagattttttattcaggtggctatcagactcattaaatagaagccttaggttaagttcacgggttgctagttggaagcctccatggactatgttcataaaataatagaaaggagttatgcaggacttcttgaaatgttatttaaaaagtcagaataggctttctattacttgtctgaggtcaaatacatgtagtgctttctgaccatttcatccagggtgttagctaggacaataagaggtgcttaaaaattattagattgagtaaatgagaaagcccttagaaacataggaacagaatgacccttgctttggatctaatattgactcccacgcctaaatccctttggagaactcctttattttctcttccatcaagagcaggtataaattaaaaacaccattaaaggggccatctagctcagctgaagctttcatcacacatgtaggggaggtatggttgggagggatctttttatcctttaggtcttcaatttacataggacttttgaataatcaaatagccccaaagagctgatcttaggactagttgtaattgagactatttctccatggggtagaaaaatctagttgtaggaaaactgagaagtagatgtatgttaacctcaaaggctgttttttacaaaggatgttaaagcatcatctttgctcagaaagggagcaataaaacaaatgagtggaaataacaaaaggaaataatggccaggtgcagtgcctcacactagtaatcccaacactggggggctgtggtgtaaggatcgcttgaggctagcagttcaagaccagcctgagtaaaataggcctcatctctacaaaatagatagatagatagatagatagatagatagatagatagatagatagccgggcgaggtagtgtgcccctgtagccccagctactcaggaggctgagatgggagaatcgtttgagcccatgaggtcaagtctatggtgagctgtgctccctcctgccactgcactccagcctgggtgacagagtgagatcctgtctcgaaaacaaaaggcatactttttagatgtaatggaatagagtacttccaaacctggctgcctgctggagttgtattggaagaggttgcacgacttcagtggagatggcctagatgcctgctcagcagtcatctagttaaagcaactaagaacatgtaatatgaaactgcaaaaagagatcgtgtacgtaaaatcactctgggctcctcagatagagtaataaacacaactcctgacagccaaataaaaagagaaataatacagcccttgacttccttggttgctttgacatactaagtaggtgttacaggttgggttctctgggaaacagactctaaaacatttttatttttactttatttgttgttattattattattattattattttagacagaattttgctctcgttgtccatgttggagtgtaatggcacaatctcgtctcactgtaatttccgccttatgggttcaagtgattcttctgcctcaaactcccaagtatctgggattacaggcaagtactaccacgcctggctaattttgtatttttagtagagacggggtttcatcatgttggtcaggctggtctcaaacacccgacctcaggtgatccacccacttctgcctcccaaagtgctgggattacaggcgtgagccactacgcccggccagactctaaaataaagtttaatatgcagaatacttatcagggaatgcccactggaccaatacatattcaagagagggcttagaagcaggattggacagaaagagaagttgagctgtaatgcaggcccaataacagccttagtgttaagcaggctgagagattcagcagttaatgagacagtcaacccaaacagttttataggcatcaaaagtatgatcagcatggtgtcagtttcctgtgtcacttgtcccacagtatgataccaaaattaaagagaccagatgacatgcaacacaagcagtgtgcactctgttgttgagaagccaatttcgtcatgcaattaagcagttttatactctgcagctgtactttaaggggagctgagatggaacatcatatgtctcaccataaccagaaaggcagatgagaaatgttctatcgccacctcccacaaggtaagggacttccctaaagatacagaggtgggtggaatattgccttggtagacttcctctcaagactgcctatcttcccatgttggaaggatcacagagcatttgtcaagacgtgggtcaatctgcagttgaactttgtgtatgtggcctatgtggatacttataatatcattgggcacctccatagagctgtttcccaattgaccaaacatatgggaagcttcagagcttcgaatgacccttcagagtagtcctgagaacagtgagccttactactcctgcattaatcagtcattggatgatagccttctcagaaataagtcatgaccttgtgcaagggggctcttcatggctgggaccacccctaaaactgagagctgaaggctgtctgccaccagcccttccacctgctgggacaagttctttattgaagggaaatctgagtagttcatcagcgtccatcacagtagtcaagccgttcattcttccttcttatgacaacattgtgcttattgttatgtaatccctttccagaacattttaggttaagttttaaaaataatgcatataaatagacaattcaaatactggggaaaaaaagcttgcacttatattgttatagaaatgtgcacacttaaagagctgatttcttctgggtatttacataactttatttaaaaatccatccatttttaattagctgtttttaatatgcagttagctaagatattataagccatatattaggctaatggacatttaacagcttagttaagttcttttaatggaaatgctgacaaacctttgtctgtaattatagcaacactgtgattacagaaggaggtgcctctccttgttgtttgcagccctaaaattccatgtggctataagtaacaaagtccattattagataaacacaagtcatacttggcattacttgcattactcgtctccttgctttatttgaatcattttttaaagttgtaaaatgtttttcaaaactcagaatagtggccagttaataatatgattcctcttatattatgagattttaaaaaatagttcaccagtttctggtggcctctatacccattggcaagtcctagccattgtgaattaagtaaacaattctttatggaaattttttaatccttaaaccctataagtttttattcatcatgtcaggtcacttgtcaaagggtttaacattcagaattcaacaaaagtttatcaaacacctattacaggacgtgcaattttgggcgcactgggatttcagcaattaacaatcaagatatgatttgtatcgacatggatattacattctctcacaggagacagaaaacaaaataactagaaaatatacataaagagactttaaaatggggtaaaattacagattgtgacaggatgaccactttggttcagaatatctaggacatttttttctttttttttcccctccctccctctttcttttttttctttttctttttctttcttttctttctttttctttctgcctttcggagtcttgctctgttgcccaggctggagcgcagtggtgcaatctcagctcactgcaacctctgcctcccatgttcaagcttttcgtgtgcctccgcctcccaaataactgggactagaggcatgcaccaccaggcccagctgatttttgtatttttagtagagatggggtttgaccatgttgcccaggctggtctcaaacttctgacctcaagcgatccacccgcctcagcctcccaaagtgctgggatttacaggcgtgacccaccaggcccaagcaaggacatttttttctgagccatgttatttaaacagagatctgaatgacaagaaggggccagctctgtgatgtaggggaagaaaaatatgttccttctacccttctaggctgcccagctggagtcctacaaagttagagtgacaaaagacagattaacaagaggaaaagcctagaagtttattaaaatattcagtgcacatacacctggtagaaactcagtgatgagtaactcaaaggggtggttagaatgttgggtttatatagcatctgaacaaagaacagtaaacttgtagagaaatgacaaaacaaagaaaaaaggggtttaggtatttagggttgccaaactgtaggaaggtaaatatatgggagaaacatggagtatagtttgtttatgccaagtctatcttgagatcaacttttcgtattcttcatggccataacaatttcccaggagagagggcttatagcagttatcatttctcagaagtttctgcttttatttagacaagggaagcactgggaaggcttctttttgcttatattgattcttacttgcctctaactaaaagtaatctttatgtcaaagtgccatattttggagtggtatatattgatctcctataataacaatcaaaaggaacagtattctaggcaggagtaccactaatgcatagtgtttggtgtaaagacaagttaacatattcatggggcaacaacaacaataagccaatatggctaagacattgaggatgagtgagttggagaagtaggcaatggccagctcatataaagacttgttcgtttttataaattgtttagattttattgtaattatggtggcaagtgattggagagtattagcttcactttgactggcttatcgaaaacggaatgtagggggtgaaagtggaataaaaagaccagtcattaattgagtagtccgtgtgagagatgatagtggcttggacaaggacgattgtactggagagattgaagcgactgatttcagatttgtagtcaacaaggcttaattggtaggagaaaaaaataaatcagtgttaactctttaatgtttaacttgaataattatgatgagggtattaccatttattgagatgtagaatattataaagtaagagcagatttgttcaaaaagtatcaagaatctttatttggacatgctagtttggggatgcttattagagaccctaggaaactgaatataaatgtggattttagagaagagcttagggctggcagatgcacattaaggatctgtctagagccatggcgctagagacctccaggagaacataaatagtctcaagatcaagccctgagacactcagatgtttagaagtggaacagaagagggacatccaatatagaataccaagaattaggaggggaatcaagagagtgtggcaatatgaaagatacaaaaagagtgttgaagggagggagtaattaataaccagcatgttatgaggggctcagtataatgaaaagataagtgactattggatttggcaacatataattttttggtgatctggacaagagcaatttgaacagaatgatggatatggaaggtccagaggagtaggctgagtaaataatataaggtgggaaaatagatacaaagattatagacaactttttcaagaagttttactgtgaaggggcacagcaagctgagacagtgaggataaataatagactcaaggatggtaactttagaataagaaatttcaatctgatgggatttaagtgttagcaaggaagctttaagaagttattttccccattagaatgatctgaaaaatgttttagaacattcctcttatattctattttatcacatttatataactttcagagaattgaaagaggtattaagttattatgaaattttctgagattaataagataacaattataggatgttttcttttagttgaaatacacctactcagcctaatttttataacttcttactgaagtataatatacttcagtagaaaagcatgcctaatataaaggtgcagctagatgaatttgcacaaactgaacacatccctttaaccagcacttagattaaaaacagaaccttgatgatacctcagaggcccccttctgccccttttcagtctctccgtgctacccccatggataagcattatcgtgatttctaataccatagattaattttgccagtttttgaattttatgcaaatggatctatttcacctaattgtaaatatataacattgtcatagcaaggcactcattgccttacactgaaaattacattgactctttgccacaagcttagacttgctttctcattttattatcatcaagcctatagctttcacactataccttgttcctgctcttccctactctatttcttggtagatattctatatcagtcttagagtgcagtttgcagaacccctccatcagaatctcctagggagcttgttaataatgcagattcctaggcccctcccatggtttatgaatctgagagtgaggcagacaagactataccctctcatgcctctataatgtaataatgtcttcctagaatgttctttgctgcatctcttattaaagaaatcttatgggccgggcagggtggctcacgcctgtaatcccagcactttgggagcctgaggcgggcggatcacatggtcaagagatcgagaccatcctggctaacacggtgaaaccccatctctactaaaaatataaaaaattagccgggcgtgctggcaggcgcctgtagtcccagctactcgggaggctgaggcaggaaaatggtgtgaacccgggaggtggagcttgcagtgagctgagatcacgacactccactccagcctgggtgacagagcgagactctgtctcaaaaaaaaaaaaaagaaagaaagaaaaaaagaagtcttatgtttcctttatggccagagcacaacattgtcatgaagtcatctaaaatttcccactagaggtaacatctccttcccctgtctagctcttttaaagcattacctccatttgccttgtatcatagctgcttgtacacctgtctgtctttccgctgaggttataatcctctggagggtcatgactttgcattcctttgtgtctcccattagcagccagcacagtgccttgcatactgttagttctaaataacttctctctctctctctctctctttttttttttttttttttttttttttttttttttgagacagagtctcgttctgtcacccaggctggagtgcagtgcaatggcatggtcacagctcactgcaacctccccatcgtgggctcaaatgattctcctgcctctgtcttccagtagctgggattataagtgtctgccaccacgcctggctaatttttgtatctttagtggagacggggtttcaccatgttgcccaggctggtctcgaactcctggtctcaagcagtctgccctactcggcctcccaaagtgctgagattacaggcgtcagctgctgcgcgcatccctaaataaacttttttttttttggcatgaaatctgtaacactggaaagatgttattgccttagaataattaagagattaaatgtagaatctcaaaaacattcatttttttccatgaaaactttaccaggcctcaagggataggaaaattatgggtacagaattgagaatctgtaggaacttgcaagataaacaacggtttcacaagaaagaccttgttggagagttaaattttcagacagttgtaataacttcacattaaagttttgtcaaaaaataagtatctgcatgttttgtttgccttccaatgccctcattttatttgattttttcccataagtaactatagtgaaagcacgaaaatgtgtttctgtgtttgtgtgcctgtatgttaattgtgactgtttctattgcattgttattgcagaacctaggcacgcactctgtaggcttgggtgctttctccaactgaaaaaaatcctacatatggataaattatttttacagccagtgtttaattttacaagtggtccccctccttctgtttttaggatggcagagagaatacatatttacttaccattatcacttactcatgctttgagcttgaaggaaatgagacagaaaaatgaagtaacattaacttctctctggaactatgtttctcatattagagctttatctgaggagttcacttcctctctcttcaatgctttgttcctctccagtcgattcaaatgtcctcttaaagcagaagttccgaacctctttctgtgacttcaggagagcatgagaatgtaaatataagttttaggactaaattttcaaagactttttccactcagctctcttttcctcttcggtttgttgttgtcgttgttgttgttgtcgttgttgttgttgctgctgctgctgctgtttttccccttccacttccgtaactgagctcttagggtccatctggaatctgattgcaattaaaaaaaaaaaagtttatttttacctccttgtacgtgctttctcctaaagcaggagtcagaagccttttttctttgaagggctagttagtaaatattttaggcttgtcgtctttgtcgcaattactcaactacgctgttgtagtatgaaagcagacaatacatacctgaatgagcatggttttgttcctagcaaactttacgcacagagaaatttggatatcgtataatttttatgtgttgcaaagttgtattattcttttgatttctccccaaccatttaatatgtaaatcccattcttagcttgtgtgccatacgcacacaggcagcaaatgcgagttgtcacacaggctatagtttctgactttatgtcttaaagtaaacagtaataatcattctctttttccaaacagtccactaatctccctttgtattcagcccttgcatagtaaacgccgtttcttcatcatcctgatttttattctgagaaaatactgtatattgttcccatgcactagggttcggggaaatttaaaaggatgtaggatctccttttcattggtcctaaaattgcactggggaggcaggtcatgtttatgaacagataaatagtatcataatataatcatgcatttctatggctagcatttagaactatagcttttgatgtcatgtggtttttatatggttgattatttttttcttatttataaaatgaaaaagtttgagaatttttcatctccttaatgtattcccttatttgagggaaaagtatttacctactacataggaatttatcttaaaattttctttgtctatctatttttatggaatataatcgagcaactattttactaattaatactttaatatcattatgaaaatgttctcatatttttaaccttataagatcagataattgctatgccaatctatggttgaaatgggttcttatacttaacgctatgctctttcttctgagatgtaaaaatatgtttaaatcagaatttatataggtgtcaattcaaaatgacagtagttcattattttgattagtataaatgttcacaactaattctattctcttatctattaagtcaccaaataaagtatatttgttttaaatatttaacagtttaaattattctttgaaaacttatgagtctaaagtaagaacaattaacccattcattttgcaagtgggatagttgaattttacttgcaatccagggatttttgacagtttgaaatatacatacataccatgtatgtttaggaaaacatttaaaaagagggggttgtaaaataataatagttcttccatgattttttagccataatgtttataatataaaatatgtatactcttgttattgaatgtagtatgtttctaatttaccagaaggcaagagaataatcctggagaatttctcaaggcatcttcgaactctttgatttattgctcacatatagtaatttgccaaatgacgccctagtgaactgaaagaattaatgccccgtcctaagtcactttcaccgagggactgaaaacctgcagcattttgccaattagaggaggaaacaatctaccttgcagagtcaggagtactggataaaggagctaagagtgttgctttttttccccttcttactttaaaaatcccaattcatcccatgtctttcttaaaggctaagtgaagtagtaagtacgtttttgcaacatacgaatttagcagactggccttgtgtttatttttggccggaaccattacacttatttccaaccctctcctttatttgttggttgataatgggctaattttgaatctttactgtcaaaagaacattaagagaagcagccctgcctgcatcgcaggctatgtctgtcctttgccgagtattaaacactaaaaaaaaattaagaaaatactaacaaaatgacaaagcattaagaaaataaaactagatgttaaaggaaatgagaaaataggaaaggatgctgtacctggagtgattttttttccccaggctacctaagatgatcaaaaaagagctaatttctcttaggtttctattaaggaattactagaatatcgggcacaccaggaaactttatcagtggacctgtcctgaaccaaattttcttaatgtatatatgataatttgttaccacatcccagattattttacaggaattaaaatatatttgaaacactgacagggaaaattgggtaagacattgatagatactacaatctgtacttgaaactgcactcaaggaattcgttagtcaagaaagaacacaatgactgtgggcccctctgggttttggaacctcttttgtaaagcatttttttttttcccaaatagaagatattatttttgaaaaggttaaataaaaaatctttgttcactatatagtttcctcctaaggagtaaattaatttatataaaatattgcaatataaataacaattttaaaatctcaaaagagcagtgttttaaaaataatgtagaaacattaagaaatgacttcaaatgataagaatgtcattggagagcaaagggtttttaatattacatatcgtggcacgtatatcagcacccaaccgctcaagatacagagttctttacaaaaatcaaacagaaggaaatgtgccaccttgttcataaactatatttaataataagccaggcagataaagtcactttcacaaataatgagcaagcccatggtaatataattcatttacaataagatttatctcatggaattcttagactgtgctttgaaatttaaataattctgataaatgccaacagaatagagaaatcaattccagagcaattactaacacgttgcattacctttctaacattaatatttctcttcatacatatcattgaagagaaaatgaggatggaaaataaaaagatcaggtaatatatttgctttctcatctagggttgttatgatcttcaagatgaagttttattttttactcctagcaaatgatattcttttttattttagtttttattattttatttttctgtaaattattggggtacaggtggtatttggttacatgagtaagttcttttttttgatatttctgagattttttttttattctactttaagttttagggtacatgtgcacaacgtgcaggtttgttacgtatgtatacatgtgccatgttggtgtgctgcacccattaactcgtcatttagcattaggtatatctcctaatgctatccctcccccctccccccaccccacaacaggccccggtgtgtgatgttccccttcctgtgtccatgtgttctcattgttcaattcccacctatgagcgagaacatgcggtgtttggttttttgtccttgcgatagtttgctgagaaaaccacgaggtaccatctcacgccagttagaatggcgatcattaaaaatcaggaaacaacaggtgctggtgaggatgtggagaaacaggaacacttttacactgttggtgggactgtaaactagttcaaccattgtggaagtcagtgtggcgattcctcaggcatctagaactagaattaccatttgacccagccatcccattactgggtatatacccaaaggattataaatcatgctgctgtaaagacacatgcacatgtatgtttattgcggcactattcacaatagcaaagacttggaaccaacccaaatgtccgacaatgatagactggattaagaaaatgtggcacatatacaccatggaatactgtgcagccataaaaaaggatgagttcacgtcctttgtagggacatggatgaagctggaaaccatcattctcagcaaactattgcaatgagtaagttctttagtggtaatttgtgagatcctggtgcacccatcacacgagtagtatacactgcaccatatatgttatcttttgtccctcggcaccccttttctaccccccaagtctccaaagcccattgtatcattcttatgcctttgcatcctcatagcttagctcccacgtatcagtgagaacatatgctgtttggttttccattcctgagttacttcacttacaatgatagtctccaatcgcatccaggtcattgcaaatgctgttaattcattcctttttatggctgagtagtattcatatatatatatatagacacacgtacatacatatgtatatataccgcagtttctttatctacttgtcgattgatgggcatttgggttgatacttgcacacacatgtttatagcagcataattcacaattgcaagtgatattctcaggaagcatgatgtaagtgacagagacttactttgtagactgcactcattcacttgttctctgaatgtgctctaggcagcctgagtttctactatgtcagtgttacatagatgagaaaccccatgggtggtttccacagaggctgcaatactatttttgataccaaaaatctgtttggttttgtgagccccagatgcccatatggaaaactgaagtgttgatacctctttgtagccctctgatgaactgcatggttcaccttcctcagcagtttgagcggggtggggagagcgcctgcttcctagccatccgattggcctgaatcatcaaaaatgctatcatgaaacaggttctgtttatctgctccagattacacccatcatgttctagagtgctggtttcatgcttgaatctagatcaagcctgctttcctcccctgcctgtactccctgtggctacctacagtcctgctgctgacagataatctaaaccaatagcacctaattagcctatttgctcatgtgttttttccatcgtggtataatgtcctccttgtcaatttagggtgaaaatgtagcaacacgttgctgatggtttaatttctggaatgcaggtaatgaatgtgtttttgcttatccaagtcttcccatcagatgtcaaatatagaagaacagtgttcagaggtcctaaatttaaattggagtgagaaattcacagcgcccctgaactcaggcaaaatgcactctgacaagtcaaccagatattcacagatggtctggaggatttgaagcctaatttggtgaaataaaattaaatgagtgaaattgtatgcagtcattaatctatcaccatacttaaaatgcttcattgaaatttcttttactgcttcaaatgaaaaaagatcaaactatgttatagaaaagcattcaaaacccttacataacatagataaaacttggttggagacttacagaactttctctgctgcttcgagaaagttacagtgcccacaaatctattgctattagaatattttattgtattcaacactcaattctaccataattatgtatatgagaaaaatatttttacctataaaataattattattaccttttaaaaatctgacattcttccttttttctaaagaaacatatttagatttagcttttattttatttttgtgttgatacatagagattgtacatatttctaagattctagtgatattttgatacaagcgtataatgtgtaatgatcaaatcagggtaattgggatatccaccatctgaaacacttatcatttcttcttttcaatgccatcataccaaaaggaagtaaatagaatttcaaatataaggacagccatgattttacatacatgcctacgattccaccacaaaccataattacgtcccccaaacttttaacatttcagatactttgtcccaggtatttcatgataaggattgggctatgactctgttacagaagggccaaatgactaaaatgtctctgaacaatattgattgcaaatattctacccagttgtcaggtcaatatgttccaattcggaatttataacattgtatctctactcccaaaccatccaatctcacctacctcacttccatattatggtgggtgatctcagattatatttaagctcatggttacttgtcaagtagatatggagtttagcctaacttttgaaatttatgctgagattacccttctcattatagaattaagtaggcagtttccaagtttagatttagcaggcagtttttttcaaatcacttaaaagttatatttttttagggcattgaacaggtttgaaatcctaccaagatgtcatgtacacatagaccaatagaacagaatagagaacacataaataaaactgcacagctacagccaactgttcgtcgacaaagtcaacaaaaaaataagcattgggaaatggattaaagatttaaatgtaagacttcaagctataagaatcctagaataaaatctgggaaataccattctggacattggcttgggaaagaatttttgactaagtccttaaaagcaattgcaaaaaaaaaaaaaaaaaaaaaatgacaagcaaggacttactaaaataaagagcttctgcatggcaaaataaatgatcaacagagtaaacagacaaacaccaaatgggagaaaacttttgcaagttatgcatctgacggtggtgtaatatccagaatctatgaggaacctaaacaattgaacaaacaaaaatcataaaacatcatttaaaaaatgggcaaaagacatgaacagacatttctcaaaagaagatatacacgcagccaataaacatgaaaaatgcgtcacatcactcatcatcagagaaatgcaaatcaaaaccgcaaggagataccatctcacacccgtcagactggctttgttaaaaagtcaaaagacacccaatgctggcaaggccgcagagacaaggggatgcttatacactgttgttgggaatgttaattagttcagccactgtagaaagcagtttggacatttctcaaagaacttaaaatagaactatcatttgacccatcaatcccattactgagtagatatccaaaagaaaacaaatggttctaccaaaaagacacatgcactcacatgtttgtcacagcactatgcacaatagcaaagtaatgggatcaacataggtgtccgtcaacgttggattggataaagtaaatgttgtacacatacaccataaaatactatacagccacgaaaagaagaaaatcatatcctttgcagcaacatagatgcagctagaggccattatcctaagcaaattaacataagaacagaaaaccaaatactatatgtactcagttatgagttggagctaaatgttaggtacttatagaattgaagatggcaacagtagaaactagggactaatagaaggggaaaggaaagggggagacaagggttgaaaagctgcctattgtgtactatgcttactacctggttaatgggatcatttgtatcccaaacctcagcatcacgccatatatccaggtaacaaacctgaacatgtaccctctggatcttaaaagttgaaaaaaaaagatgtcatataaatattcgtggtcactaaaagtatctaatgtattatacataaaaataaaaattgggtgaattggaagtgtattctttgtatcaagtcatgtcggagatcctattctgctttgatcacagtgtgaattcttttgcatttttgttaccagtcacttctttatttattgaactaataattacatattctgataatctgtcagaaagataaaaacattctttgtccatgtgtctgaaaatttttaacctatttttctaatgttttaagtgagaagagcatgttaatactgaaattgtaagcagtagactgaaaaatcatcccaatccatgggttatatattgaattgcttttaactgtattactaaatattaagcttaatttattttatttctacatatccccatttccactataggtgatttgtatgaatttaggaacttccttctctcatccatttttatattaaaactcagactttctaaaacaatatttctatccatccatcgttggtaactatgtactgacatgttttgtgcatccgaaaaatgttagcattagtttgtgcgcacagaagtaattccagtcaccatatgatgagctgatttatttatttcgtaagtgtgttcattattattatctcttcagcacccaaatatataggggacttaatgatacctacaagtaaaaacggaagacaaaaacgccctgctctctacagaggttaaaatgtttttgcaacagggctctagatctcagctgtgaaagtagggacgagatgaggctaggcatgcagtgtcagtataatacaatataatcaacatgtcagcatctaatgcaggtgttgcaaaacaaaatgtacacatgggtagtcaggtaacagaaaagcatgaagtagtaagggctatctatgcaagaggttccaagctgactatatactgaaatatttaaacactatgtggggcaaataaaatggacattagaacagttcgatggtcagttggggacttctgctctttcttccagtctctgaacatatcttaaagccacaatcatctatttttatttattgttatacatttatttataagccagcacccctgtgatttaagttctgttgaaatgctgagttggaaaagatcgatggatgggggaaatttagtgcagaggttttgccccaggttcaaaatcctttataaaatattaatacatggaacaaatattgaacaattaaaccactgataagttaatcaatctgattcaaagtacacctgtgaagagggacatggcaagaaaaatattacagtaagaactagaaacattccttcatggctgcttgatatggatatgtcatgtttaagaaaattcttctttagactgttgagattttttttcctgacaaagaagattcactgtcgaggaaagaaagaggtactgtgaaatttgttattgaaaacatgcacatacttttgtcagaatgagttaaagagtgaacaaaatgtgcctattacttacgtgttgtgctgttttaattcaagattaaaatatttaacgtccacagacaagaccacttttatatgaatattatttttctgctttattgctcaattttattaccatttcaaaacacccgtgttgctttctatggccaaagatgtttagcacttttcatggttatacttctgtacagtccaaaatacaacacttactttacacatacacaaacatccaatgtattttgttttctgtcaagtaaagacaatgtctgtgttattaagttaaatgtcactttcaaatacaggatatgttgatattagaatgttcaactttatttcctcatttaagcaaattacagtgtgaagaatgtaactgcagcaatttataaaaatcatatcacattcaattatgagagcaaacttgttttgtagacttgaactagtttcaattaatcttggagttatcatttcaaaaattctaaacagagagaaatacggagtgtaataatggtaggtctttgggtaagctgcttccaggaaaagaaagcaattatatatgttcacatagcactgacaaggagaaacaaaactttggacggcaaagaacttgcattagtctttttgacatgttcctgtggtgtgatttattacgtagacaatcagctcaacttctcaagtttgatatccttggaatcatttgaaatttaaattttaatgaaaattcattaattccaaggccaaaagaagtgattctaattgcttttgagaatcagactatgaaagaattctttggcaaacttgcactgtcttttctcttttatcattggttgcttcgtaggtacttaattgaaggtcctctgattatcagcacgggctgacatcagttcactccatgcattttaaacagtaggccagatgtttaaaggatcagctgaagcatcgatagcatgctagggtgaataataaaattttcattatctacaagaagcaaataaaaagcataagcattttcccccattatcctgaaggagaagatgaatgcctaagcaacattttaagaatgggttgagtgtggcctgtgggaaaatttgggtagaaaacttgtagttagctaatgtatatactgtttgcctctttagctcaccatatacccacacacatgggcatgcatgcatacagacagacacatacaatacacacaacaaacaggaaattcagatatactgaagaaatgtatttaagggattactaagtttttgtaaataaaatcctttaagatgctgagaaacaatggaagagaagtaggacatgatggctcatactttcgtaatttacttgtttaacgtttgccaaggtttaaattaatgtagatgtttttgtggctaggattaatgatctaacagtttggaataattaggcacttttatcacctagaaagcccagaaacccagcatgcaaaaattctggtatgtctgcattttacacttagatataacagagaaatgacaagtagtcaagtggatagagaaacgaatgattcttcacacatgcacacacacatagaaattgtctttttaatagtattttaatgtaacacatttatgcataatttctccatagtgtttatcttatagtgaatatgtgatgaatagtctctaacattagtggttttatagattaaacataattaaggctttatatattaaagagtcaattggtgacattctaatataaacatgtttatctcatatacattgaaatattagataattcattcgttgagaataaatcgaatgagtcaaaacttttaacctccactttgagctttgtaatagtatccactgaaaatattcatgaaaatttttaagtcatttctatttatatattcagtccaaacatctcacaagtttaaaatgtaaactcaagaatataatttctgtattctacaattggaagcatccatcatatcagatgaacttatatagtttgtgaaattttgcaaactttctgtttagtaaatcttaatgtcaaacattttaacttccaggttgtctttcttttcagttttaatatccgcgatctttgtatactcgttgaatggattctcaataagtaacccacaaatatatatacatactatgtacctacaaaaaataataaaaagtaaagaaatcgacacttatccatacctgtcccatagtaataaactattcataagtatatttgaaagatatgagaatcataaaagttcgtgtttgcacccttttgtgcgtggaatcctaggtttgcattttgtggatctagactttttggagtgtggaaataaatgaaacaaataatcgagacccagtcttatattcaggttatcattttactacataaagcataaataacatttgcagtttgtttctatggctagctctaaagtcttagcaacgagaacattatagaaagacttcaactgtagcttccagcagaacttctgaggttccgtttatggactaagcagcagttgagggggacaaaactcataggcaattgatcactccaaaggatagattgtcttttctaacctaatcaaaagatttatagtgaaggcatattcagattttgttgaaggatatggatatataatcatgtgtgtgtgtgtgtgtgtgtgtgtgttagacatacttaaaacattatttgagtagaaaattctgcacaaatggaaaagtataacatgtgttatatccacacatgttgagcatttacctggctgaaacatcaaaagctgaattgacttaattgaatgttgaatacttaatagttactttgtagtgactcactattaaaacattatctcaagctttgtcagaattaatttttttaaaaaactcagattagtgtcaggtttactgaaacagcagatctgaaattactgtgtttttttttcctttcaataatcagtttctaatccaaaattgaatatcagttccaactctacattcagtttctgttttacttgtttggactggcttttggttctgttttccacatagatcctctctgtgtaagacaaagccatttgtgcagattaaattttactgagcgtgttaacctatttaaaacattcatccaaaaagactagtatgaattcttcatatggcaagctgcttgttttaaaacttccatttattctaaaatcctttttacttatactttttaagaaacgtattcccgatatacaaaagtaacacatgctcattaaaacaaattaaaaatagtattgtataaagagctgatacatttctgccttgccccatttaactttcttaagtgttcatgtgaatcatccattcacatcaagacatttatctgtattcatatgaacgtgttttaatatatataacatatatagaattttatataaactttccttttaaaatagaaatgaaattatatgatatatttattctgtgtctagctcttgtcacgtaattattcaagaacatatttctaggttaatatctgtattcttaggtagcattcactaactcctcatctacttgttttcttccattctaattgtgtttaacatttcttcatacaattggttgtcatttggtcttctttcatggagggtgcataatgttcattctcaccaattctttacactttacataactgcttgatacgaagccagaccttataaatatcaacaaagcaggaacactgtaatcagctatcagtttcagttgagctgaatgaccctgaatatgtgtacacatattttccaggagattttaaaactgacacctcagatttctaagacctggagaaatcagcatgagaaacattgatctatattattccgtgaaatgatttcactaaatagtgaagcatctcccacatgtggactctgtaatttattagaataaagagttcatgtgcttctgaagaacttgaactactcttctggcctccgtacattggtttcttagctataggaaggctgagcatgtttttcctatgcgtttcctttctagctcatcattttagtgacaaaacaatctttcgtggtgttgctctagctatagaattgtttcagattcatttgaccaaaggtggcaaatacaacagtcccaacaaaaacaaaagacctattacagaatgatggaaatgaccccagggaacaatggcacctccacatttcttaattccaaggttataagcagtggtgtggacaattctcaattccaatgctgaatcgccttctaatttcaaatacctgtgctaaaaattatttacgtctactgaaataatgaactggaccccaccaggaatggccgatatgcttgtagtcagagcacaactgtagaaagaaaataacattttaatttatagaggtatgatgatagctgtttcatactgttttcagaacgatgaatggcctgctcagtagtttcttgtcatcgtactgagacactttaatttcttaccagctgagatgaggaatacgagcccagtgtgcaggtgaaattggttaacaggagccattaaaatttggaagagtcagaatagcatcaatcaaaatgctttcagtgtaggaagtaaacatgtactagcctgacccacctgtcttttcttttaggtatgttggtaatattacaatcattttgaggtatccataaacaactgcttagatctgaagaattgtatatctttctttactctgccctggcctggggttatggttctcattgagctctaacctttcagaaaaaaaatgtagagaagtggttcaagaagaatgctttatcttgcttcataaaaatgatagtgatagttttattgaaggcttactatgtgccaggccaaagtgcgttttattatcgttcccattttccaggcaaagaagctggagcacagagaggctaagtgagttgtccaggatggctcagctaacatgctgcagttgggatttgcacccagaccaacttcttttcaaccactgtcccatcctgtgtcttctctactcaaaaagtgtttcagctccaaacctgaaactttaaagaaaaggaaatccttagtggaaagactaggttttagtcacaaattatctccttccttacattatttgtctctttttcaaatactccaagctttgattaaaactgtctatcactaggaacattgtagaattgctaaggtggaattgttaaaagaactcaattccaattaactttgccattgattactgtgtgttctggaggggtgttctttctttcaggttaatgatgctttattgtatatctcaaagattaaaaataacaatgaaggaagtagcaaaccggaacttctctcacaatgcatctttcaatctcgtgctttaaatgaagataaaatcatggctgtggtaaggttgcaggaaggatgatatagattaagtttcttgcaaactgccctctgaattttcaatagctgtagaaggtattggttttccaaaaaattgacaaattgaggattcattcagcagtttttttctaggtctcttaccagaaagtgatcactaaaaagtgtagggaaaccactcaaagttggatagatcattattttcacttaagcattttaatttcttgaaggagctttataatgcaacaaagaatttacagtcctgtgtcaccgcttaaattttctagggtcatcagtaaactcagtggaaataaattagttcatgaatataattgacccttaaattctgtcactgtgcaagtaatcggtgggtctgctggatatggctttcgagcagacaggtcaacttcttcaaacagagaagaagcatagcataaattgaagacaaataacaaactacttgtttcctccttctttggcatcaccctatggatggagtatgcatttataatttaacacaatcaagagatctttattatcctacttttgggtacaactgcttcgtttctcttttgaatctctacagctatttaaaaatctgttttgtaaaattctttaaaaaactaaaacatcagattcatatttcaggtatcttactatcttataccaacttaagcatccagtattatcacccacccttcccctgagtgaatccttagcactgggctcttcctgttttatccctgtgcatgctgagctctttctggccttcaagtctacttccgttgcaactgttgtctgaatggtctctctatgtccttcttactctctaaatatttcggaatttaaagcctggaataatctaccttagtccaaaagatatgctacactattctagttcacaatgatctcacactgccgttgatacacaacatttaatatcaacttaatatctatttcagttcattacgaggtcacttatgctacatcttatattgttgccttggacttttattatctcttcatatatgtgtttatggtgctcccaccctcacgagaagttgcaaataccatgttagctgtctgatggctttctatgttgtcaggtataccatttcccaaccagttggcattcaatgattaagttcattaacaaagaattgtatgtgttgaaaaagatgtttttttcttaatgaagcacttgtttttatttttttaatgaaatccaccctcttaataaattttaagtgcacaatacagtattgttaaatataagcaaaatgttgcatagcagatctttataatttttttaaccctacatgcctgatagtctatacccattgcacagcatctcaccatttcttccctcctccagcccttagcaaccaccattgtactttctgtttctataattttgactactttagatacctcatgtaagtggatgcgtgcagtatttgtccttttacgacttgcttattttatttagcaaaatggctacaagattcatccacattgtagcatatggtaagatttcctttttgtggcagaatgatattccattgtatgtatataacatagctttatacattcccctgtcaatagacatttagtttgttcacacctcttggctactgtaaaaatgctacaataaacatgggaatgcagatatctcttcaagatcctaaattgaattcgtttagataaatatccagatgcgggattgctagatcttatggtagttatattttttatttttttgaggaaactccatattgttttccacaaaagctgcacaattttatatttccaccagcagtctacatctccaattttcctacaccttcaccaacacatgtaatgatcttgggctttttttttttttttttttaataatggttatcctaatccgtgaggtagtatatcattgtggatttgatttgcatttccctggtagttagtgatgttgaacatcttttcatataactgttggtcattttaatgtcttctttggagaaatatctattcaattcctttgttcactttaaaaattgggttgttcgaatttttgttgttgttgttattacgttcctcatgtattttagatattgacaccttatcagatatatggtttgcaaaccttttctctcattctataggttgcttttaattctgttgattgtttcccttgctttgtagaagctttttagtttgatatatttctgcttatctagttttgtttttgttggctgtccttttagcgtcatatccaaaaaaaattattgtgaagaccaatgtcaggaaatttttcccttatgttttcttctatgagtttcatagtttcagatcttatttttaagtctttactccatttcattttgagttgatttttatgtatagtttaagttaaaggtccaattccattctttgcaatgtgtatatccagttttcccagcaccattggttgaagaggatatcctttcccagttgtgtattcttggcacccctattgaaggtgatgctaggtttatttctgggatctctattctgttccattggtctatatgtctgcctttatgacactatcgtgcgctcttgactgaggtagctttggtaattcattttgaaactagcaagtgtgatgcctccagtttattcttcttcctcaagactgttttggctatttggagtcgtttgtggtttcatatgaattttaggaaatttaccttatttctgtaaaaaatgcgattgggattatgataggaattacactgtatctgtagatggtttggatatatagacttttaaatgacacatcagatgtatttccatttatttttgtcatcttcaatttctttcaacaatatttcatagctttcagcacacacatcttttaccttcttggttgggtatttactaagttatttattctttttattgctattgtaaatgagattgttttctaaatttcctgtttttatgttgctagcgtatagaaacgcaactgttgaatgatgactttgtatcctgcaactttgctgaatttgtttattggttctaaccatgtctctgtgtggcgtcactcttaagattttctacgtatcagatcatctaatttgcaaacagatataattttacatcttcctttccaaatttgatgtattttatttctctttcttatctaattgttctggctagtacttctggtacgattttgaaaagaagtggcaaaagtgtgcattcttgtcttgtttctgatcttaagggaaaagattttcagtcttttgccattaaatgtgatattcactgtgggtttttcatatacggtttttattatgttgcggtaatttcgttctattcctagtttgttgtgtgtttttatcatgaaagtgttgaaacttgttaagcgctttttctgcagctattgagatgaccatagatttttagcctttgttctgttaatgttgtgtatcacactgattagttttcataaattgaaccatttttgcattccaagaataaatcctatatggctctcgtgtataatcctttcaatatactgttgagttcagtttgctagtattttaatgagttattttgcttctatatttatcagcggtattgttctgtacttttctcctagtgtcttttattgactttgatatcaggatactgatgccccttgtagaatgagcttggaagtgttctcttctctttaatttttctgaagaatttgagaaggattggtgttaattcttctttaactgttcattagatttcaccagtgatgacatttggtcctgggcttttctttgttggaaggttttggactactgattcaatctccttactagtttcggcctactcagattttctatttcttcaagattcaatattggtagattgcatgtttcaaggaatttgttcatttttttctaggttaacatacagttgtttacagcagtgtcttataatcatttgcattctttttggataccagttgtaatgtctcctctttcatttctgattttacttatttgaattttcctttttttttttttttttttacttaatctacctaaagatttgtcaattttattgatttgtttttaaaaaaactcttagctttgttgatttttctattgttttctatttcaattttggcttttttctgatctaatcttaatatttccttccctctgctaactttgggcttagtttgtccttctttttctaagtctttgaggaagaaaatggcaaggacatgactttctttagcagttggaaggacaatgctgtaaatactcaaaaattaattatttttatagtgacaaaaacaaaataaaaaacacttcaaagcaaatgaaagtttatcatttaatttatcaaatcactaagcagactgcttgatcagagagaagatactcatatgatcacataaaactgaaagattaagaggtaaggacattcatgttatcattacatctaactttcttatttccaagatggagaaactgagggttggagaaaaagaaagatttctttgttagatacaaacagacaggactaaactcagtatagcagcctcctaaattccaaagtatcatgatactgtgattttatgcattcttcagaaaaatagtagagccactggattctggcaaagaagttatataaaatgtcaagttcttcctttgcctcagaaatgaagttttatgttccaaaattgattgggaagttctccttatacctcacatcacgtctactattttacattgtttacttttgaagaatttttttaattgacaaataataattgtacatattcatggagaacctagtgatgtttttatatatgtaatgtatagtgatcagatcagggtaattagcatatccattatctcaaacattggtcatttatttgtgttgggaacattcaacgttctccttctagccatttgaaacttctatattattgctaactatagtcaccattcagtcgtatagagcactagaacttatttctcctatctagctataatttatttttaaatatgctttttgaatctgttactataaattgaatgtcacatcgttttgaaaatattcttaatttatgctcaacaggcaagattacacacctgtgataatatctttaatttaaaacattactctgtttaatttaccagaatatggaaccctagtcattttagaggtggagcaaatttcagtgataatctagtgcaaatttctcatcttatgaatgaggagattgagtctgatataagggacgagattttcgtcaatgagcagcttgttaacattagctctgtgatagaacacaggcacttgtcctcccaggccggtgtttcttctactctatgatgggctgttttgttgtagtttttaaacagcagcattttcaccatgcatagttttcttccaaagttcgttcttaacgtttttgcacagaataactagattttggaagtagaaaaaggaaattctctttgcatccttgtatctctggttattttctttgtcctttgatctctctctcctcccctcccctcccctcccctccccttcccttccctcccctctccttcccttcccttcccttccctcccctctctcacacattagagaaagagttaaggtattaaagaatacataatactattaaatttccttcacatagagaaaggaatgaaaaaaagtgaaaaatggtcctcaccaaatgtccaaacttctgtaggtcatttccatagtatcagcaatgtcctgtatggtgcctcggggatatgtaagcaaatgagcaagtggttagctaattctagctttggcaaacacttgttatggcttacttgaggagaagtcacttctccaaagtgaaaataatgtgcacaggtcaattagaatttttttgtagaaaaggaaaatactttgtagggacatggatgaatctggaaaccatcgttctcagcaaactattgcaaggacaaaaaaccaaacaccgcatgttctcactcataggtgggaattgaacaatgagaacacatggacacaggaaggggaacatcacacaccggggcctgttgtggggtggggggagggtggagggatagcattaggagatatacttaatgctaaatgaccagttaatgggtgcaggacaccaacatggcacatgtatacatatgtaacaaacctgcacgttgtgcacatgtaccctaaaacttaaagtataataaaaaaaaaaaagaagaaaatacctccttatgctcctgacttattttctttttggttcctcagtcctcttctctctctctctctctctctctctctctctctctctctctctctctcacacacacacacacacataccccacatatacaatatgattaaggatatatgtgaataatgaaagcttcttgtgtatagatttagaagtctaatggacaaaatcaatattttcctatgtgcatttaattcccccctttgatttaggtatatagtctttttttaaaaaagagaaaaaaaattaggtgaccttaaggtatagatcctactttcaaaaggtttacagaactagggagaggaacatggacaagatttaaagaactattttaagcagaataaaatgtgatttatgaacaaagcatatattatttgtgcgtatgtgtgtgtgccaacaaagatgcaattaggagattgcacagggagatgtcattagaaccaaccttaacgggtgagaagtctttgaagacatttagaacatggaagatctctgacagagggaacaaaggcatagtgacaaaagtcaagggcatatttaggactggagagtggtatgtgtggcttgagagtgggcgagaaaaaacaacaatgcctctgtaataggaaagtagacagaggcatgacattaagagctttgccagctgtgctaaaagtagtgaacaagagctaacaaagtgaagaaatgtaccttttctgatgtgtatcattcccttattcatatacttcttgagggggaaattcattctgtgttgatctagtaaactactacaggaccaaatgataaaaagaagtataggaaagaatgtttcagcatactttacgagataacttccttgtagctattctccatagtattttgagcatcacaaagcaatgagctgaaactgtctaagccaaaattgacttgtcatctgttagggatgcttagatgagaattctacatttgagagcttcttagattcattgaccactatgtcccattctaagatccatgaatgcgtgacctaactattacaccttcttttagtctgattgtcaattttgtattttcaattgtgcaagtttctaaaactattttaggaagataaatctagcagtggtgtgggaatagacaagagagaaggggaaagactcttcaggaaactaaactcacaatttatgagtattctttattgcccaagtcttcccaaagtctttcatcaagaaagaggcattgcaactctccttttatagtttgtttttattctggagcagtgatgttttggtggagttgttcctcagtgcgtaattaaagggcctatgacaattacagttcatctcctgctgctcaaggtactgcagatatttggatctactactctcattcatttccaattaatgtcagctttagatttccttcagtatgctatgttataaaatttgattatcgttgtgcccaccttcccacttaatttcaagcaggtttctcgattacctgactaaactaatgaaatctgactaacccaatatctgtggacagtagtgtgatgttactgatttttgtatgattagtcaagtcatattcatgccacgttttcatatagtaccataaaggatattcttctcgtggtccttttcttttattctgaacatacaatgagaagaccggtaaagtgggctaggaaattaaagaaaaatacaaatggcaaaaaatatgggtcactcgaagtctagaatagagagcacaatcaattttgaattaaggggtgataaggtgatttggtcaggtgactggtgaaacaggaaagaaactatactttttgaagtgtttcatccatgtgttaagattcatttggggtcaagaatctaaatttcatatccctgggagtggaaactaagtaaaaaaaaaaattatggaccttggtttaatagctagaggagcaagagtgtatctttatgtgacttaacttctatgtgaaaagtgaaccttaagattaattattgggggaatttacttactcaggttctatgcctagatggtctgcccaactaagaaaacttattttcctgttactccatcctatttttcatacttttatactgcacttgcagaaaagcatatatttctacccaatacgaaaattcctgggaacatatttttctacatttcccaaattacttcaaaaagtaaacttaggttatttcatgatctccattacaatggacaggtggccttattgaatgttgtcctgtgaatacaaagatccagagtttaaagaacaaggtgtacttgcatctcccacttagggtttgcttgtggtggagagagaatctagtttgcttaaaaggatgacagtgcagtgccccaaaatatctgatatcattaaaagtctcatatttgtctttcgtaacttctctagggctgtcgatgacaggagacccttaactcctatgccttgattatgtgaataagcacatgaaaatattttagttatcttagttcacttttaaactaagtttcaattatcactagattctaaatatcatcattgagccgttcttaaggaactgattttctacatattcattcacttcacctatatctagtgtgtctactatttgccaagaaaaatttactctcttaattcagcattccatatacttaacatcataaaaagtaggccatttttagttttctaaattatttatttaaacatttctttaaaattacattctatcattacactatatttcaacactacagtaagcagcctattttgtgatttttccttatataaaatacataattgaaattaaaaatgaagttaccaagagccattttcactctggggaatgcacatttataaattatggggttattttttcttcatcagctttcatattattaaactttgtctcttcataattacagagatgactagacacagaagggaatttaacatttggtgtgcatttgtctaacctatactttatgttagaaaatacatttccatttgaaaaaaaatcagtaattgtgggtgtgatcaagagggcagcctgaaagtcgggtgatgtgactcacacctgtaatcccagcatttttggaggccaaggtgggattatcgattgagcccaggagttcaaaaccagcctgggcaacacagtgagagcctgtctctattagggggaaaaaaaaaaaaagaggaagttagcctgaggcaatgtaaatgaaatacatatttcaaggatatttatacatgattcacgttattcatataaagatgtgccagagaagactataggtacgttattttacactattttgctaggattttaagaaattcaatgtgtttttatttcagttaacttagaaaacttacctaacttatacttctcatggacacaaaagtttttaaagataggatcaaaaagcccacatggtgaagcattttgaactggatgaaaaacatctattatctttaaaattttatgatattactgattgtaatagactccctttttaagaaatcattccttatagaacataaggtttacatttacaatcaacaatttctatccttactacaataaaggcacatataaaaagtacagttgcatatttagcaggtttaattgtacattttaatgtagaaatcaattcaattctttcatttatcagcattattacagtgatttcaaattaagcataggtaactttgatatagataaatgatgtacacagcagttaaattttattttcaattatgtagtaattgtataacctaggcagtataatttgtaaactttgtattttattattatgcttctcccacttggcataagcacaacacttcctaaaagcataattttctatagacttaataactccctaaaaacctgttttggacccctatactatttgatataggcagaaaaaaaacataatccatgctcaaatttgaaaaatgactggtcacatttggtataatactaaaggtaaataaaatcaagagtctatgaacatttccggacctgcacatttgttttattaaaatgcataattgtctttagtgtgtttctatttgtttatactctactgattttaattaaaaataccaaaatacgtttattaaaaaactgtcagaatctaagttgttaaatatacttaactaggaaagtaactgtttaaacgagataatttatagagaaatgtggtgtattgccaattagatgtcaagatacaatacaactgataatgaaaaagtagcattttcttagggatggaatacagtgtaaggaacaccccagtaagaatacaaaaattactgaaaaaaaatcttccttcctgaaaaaccaagtgcccttcaagtgcagaacctcatccaactaattgttaggtatcactaaagcctgataccttcaattttctggatcattcaagctgtatttttgagtccttatactagaggaggtaaagagctataaaaacacttaatggtatctgatgtgaactgtggatcactttgacccatcacttctacgtctacatcttggataaattcccattgttgtcatagattgtacaggtttaatggtgcgtttgtggagggggctcgcttatagaaaatggagactctgaagggataaggaataaatgtatcacttcaggtcttttatttgaaattggggtccagagagcctttttgtatcagacttgtcaaaccatttccatttagtaattatatatgcactagcacttattcctacttacctcacctctttatgcccatttccttgtagttgcggttatgcatgaataatttattgcaccccttaccaacaatggaataaaacttccattctgaaagctttccatactcatttccaatagcaatagggtttttttaacggacgtattacaaatgtacgagtcagttgaacatagtattcctctttgtaagaactccaagtggatgcatgctgttgtctcaaatctcaattagaccttgctttgaggtcccttcattgccagtcatctgttctccttcccctgacttgagtatttctccagatatagataatacattttcccaactctgtgttccaagaactgacagtggctttcattcattttgtttgtttgtttgtttcttctcgttctcaagtatcccgcagtctactgtttcttccctccattcgtttgtcctttcagagtttcaaaatccagcataggtacttcttctaaaatgtcttacccttcacatacacacaccacttgagaccccatcagcctctgtccacacagtttggttacattcatagactatttttatacatcaaaatatttgaaaattttagggtaaatctcagtagtcattcatttttgctcttattcaaccaatactagtcaatcagcctgtgccaggttttgttgcaggtaccaggtatccatccataaagaaaacaacgtccctttgttgtggaatttacattttagcaggggaggcaaagaacccaataaatatgataaaatatcagattaaaagtacgatgaaaaaaatcatcagggtaaaggaaaaagggaagcagtattttagcaagagtggtgaagagaggaggctgagagtgtgacatctgagcagagacctaaatcaagtcaaggaatgaaacatgctactatctaaagaaatgagtcaggataaggaactagtaagagccgaggcccagagatgtgaatatgctgttccaggaacagcaaagagactggttgatatgatgtgaaaaatgagaagaaaccttatgatatgtgtcaagagaaaaaaaaaatttaaaagcatgcttgggaacggaggcctccagatgaaaaaaaaaaacacagttcaaatccttgttcatgcatttagtttgctttgcaatcttgggcaaaatgttaaatttctgtacgttttatcttcctcatttttaaaataggcacaaggacatctacttaataggttcattgtgaggagtaaatgagatgatatatctaggatgcctggcattatatcatacacttaataatacactgaataaataatagttatgtctatttatttccttatcgtttttattattatttcaatgcacagacctgttcataagataatgataaatattagtggcagaaactgaagatgttataaattattaggaggcgggaccactcagttcaatgtatctgttttaatatagtcagcaaaagtgtgaagataccaacaattaaatttcaatgcattcttccatttcactagttttataaactgatgaactaccagaatgtcaatgtatgaattgcatactcattcttaacaaacagatttgcaaaattatgtgtaaaattagccctcagccttccaatttgttattgtcatatttcatggaaatacataatctgtaaatttttgttttaatgatatgtgaaactgcctaaagtagagtcttggcaactacttcacatttgtcctccagagatagtggataaaagtgtcaataaatgaacactctatattcactaatcacaggcaagggacaaggaacagagtggtcacaaaataccacaaaattaaagcacattccaaattaaatatatatgtttttattacagataatgtttgctagactctttctaattatctgcaaagattttaggaatgttttaatgttttaatatttacacacctgtgtatttcaagttcagtcaaacactattgttaaaactaaatcttctcatctctaataataagatgtgaacttatcttggaaggtggttattaggatgggagagataatgtatttcattcaaagtaaaaatatttctctgtttctatctttctctttctctgtcatctatttatcatctatatccaggtatctatgcacctatgtagactagcattcaatgaaccatagatattattagtagtagaattgttactaatattaaaataagaagtatttaagaagaaacatgtcctaaagcataaggtcaattattactctcatgttttttggcatatgaagcctaaaaagtgtcaatttcaagagagtattaataaagattgtgataactgaaaggttcctgcttgaaattttgtgtggtcttacaaatatataaactctaagcatttcagtgagccaattactgactaggcactatgtcttatgactcttttgtcatagtatgtaaaaaacaaagagtagagacatcataaaaattatagtagatgggcactagggaattacgcaaaataatttgtagatttaatgtgaaaccaaaacatctgttcaagtcaatttcccacaggtcatgtggcaaagagtatgagttccagactgaggagaggaaaaggttgttcttccacagggaaataaactgagtgtaataaacataatttttcttcttaagcattatttaaaacaaaaaaaatgccattaaatctatctttcctgcctctcttatcaatgctcccttccctttcaccacttgtttcaaactccaagccttgggattttattttggctttttgccttaatgtaactaaaatgagagcatcacaaatatgaagctcatcaaataatttagcagcattttcccctgtttttaactttctctttggaaacgtagatttcgaaatttaagggcccaaaatatgaaatgcaattataataggccatttgttcattcagcttgataaacttgaataaatagtattgaacttttaatgcaaaaagaacaaaacaaaatagaactctccacgaagaaacttttcaatgtttgcatttctgtgtgaggagaagggtaatgaatgtgggaaccttaatggaatccatgttcttccagtgatgacaagggtcaaaatggagaaaaatggtcactttctacccagtacattatattagttctatgtggacaactataacatagctgatgctggttttcaggccataaatgtaggtatgtattttcctactatttataaggcaaaatttctatttgtttaatgatttctatataggtagattattctgtctttaggattaaaaacgacctgtagaccaagagactttctaatgtccaccttagagtatatggcttttactgttacagtttccatttcctttgcttgcccctttgagagaaggaaaggagacatttgggatacatacatcaatgaggagctattaatgaataaatgaatgaaattgtcagtcaatttatccacatgatcatcaattgccaataattttatcacctctgtgggattaagtagaggtaacagtttagaaatttgattttttgaaagcatttaaaatgttcaaatatatcactctggtaactaagggaaagtgtattattttcttatgcttagtcttattttggttttgcctttttaatttaaattgaacacttatatcaaagagcttgcaggattataatttgaatttttgaagcaaagatcattttcttaacatcaaacaaagagtagatacaataggaataaaatcggcagaaaaacaagagtatcaaggacagacggggagggtgggtctgtgttagcatgtattgctatgaagaaatagccgagactgggtaatgtatttttaaaaagagctttaatcgattcatgattctgcaggttgtacaggaagcaggacaccagcatctactcagcttctggggaggcctccgggagcttttactcatagtggaagatgaaacaggagtaagcatgtcacatggccagagcagaagccagggggaggttgccacacatttaaaaaaaaaaaaaacaaaacagatcgctcaagaactcagctgctatcatgaggacagcatcaagctgtgagggatccacctccgtgactcaaacatctcacaccaggccccaagtccaacacttggcattatatttcaacaagaaaaaaagtttaattggctgatggttctgcaggctgtacaggaagtgtggcacaggcatttgcttggctcctggggaggcctcagggagtttttgctcatggcagaaggtgatgcccacacactttaaaaaaaaaccagatctcatgaaaactcactcactacactgaggacaatacaaaaccatgagggatctgtccccatgacccaaaaacctcccgccaggccccaccaccaacattgggaattatatttccacttgagatttgagtggcggcaaatatccaaactatatcagggctcatgtccagttatatgtcaacatgcctgcattcgaaacatcctgtccaaatcactgccttgtcataatacttatatttttctttattgaatacgaacacaagaagattaaataatagcatttctactttaaaacagtgggcaccatattaacattggaataatagtagtaataacgatagtaataacaatgatataggctgggtgcggaggctcacgcctgtaatcccagcactttgggaggccaaggcgggcggatcatgatgtcaggagatcgagaccatcctggctaacacagtgaaaccccgtctctactaaaaatacaaaaaaattagctgggcatggtggcaggcacctgtagtctcagctacttgggaggctgaggcaggagaatggcgtgaacctgggatgcagagcttgcagtgagccgagatcgtgccactgcactccaacctgggcgacagagcgagacttcatctcaaaaaaaaaattaaataaataaataaataaataataacgataaaaggatatgtgtaggttttttttttaataggctgttaacattaataggcattgtgatttcagggatatcatcaaacatcctggtcctaagacatcccctattgaataggaagggcttaagttaaacttctcatgagccacaattttctgattatatgtttggtgtgtgtaatagccacctcagtgatgatttgattagcctggacccttacataatcattgaagtatacccatgttcctttatatacttctttagtgttgaaagctcaaaattaagcaaaatagtccccttgataatgtttagattcttaacatttgctttctaaagctggcaaatactctcttcccagtgtcatgaagttaaataacatgttgcttagtgaggactttaatgttgccatgccataggaagaccttattcgaaatccccttacctgggagaatgtcagattattaccccccaacttgtttaacacttttaggattttaaaggtgttcacatttgtattagaacaaaatactattgagaaacatttctagaaaaaaattatctttccaaattaaaatcagtggtatgtaatgtaggagtctgattataatgattaaaatacatgggctttgggcatactgcctaggtgaaactcctggtttattgcatcactattagtataacctatgggagttaacctacgtaagcctcagttaatttttctctcaaattgatctaataatcgtctctcataggcttgttttgatagatatttcagtgtatataatatacttaggacagtgcctgatatcagtaagtctccttatatgctatttttctttctattttaattatttatgcaagagaaactattatgctttaactcaattaaaataaaatgcctttgtatttattcatgtcaaaggaaatatgcaagtattgcattcacttcctaggtgcctttttgaattgagctttgcatggttagtttgtataaaaggttcagtgaactttctcataatgattttttattgaacatatggaatccattaagtgttagcaaaagtcactatccactgagctgtgtccaggggctgacagttatgtctatctcttgcaaaaataaacacatacataaatgcactaagacgtatattacctgtcgtcatctcttagagcatttccatttttcttttaagttttttctttcaatgggttttttatctttgtgagtacatggtaggtgtatatgtcaacggggtacatgaggaaggtgtatatattgatggggtacaagagaggttttaacacaagcattcaatatgaaatagtcacatcatggagaatgggttatctatcccttcaagcatttgtgctttgtattacaaacattctaattatactctgttagttattttaaaatgtaccattaagttattactgactatagcaaccctattgtgctatgaaacagtagatcttattcttatttttctaacatcttagaacatttccacaaacactacctgcttgttaaatatacctattctaatcttcatataatcaattacttttttcctctagaatgtactatgacacatccatggggaaaatgtagtaatctaattaagactatttcctctcattttatatttaaaagaatgtgctctatcaatttatttacttgtacagccgtaggcaacctctaaaatatttaaagttcttaaaagtcagatatttcagttaatattgtgattatatagttgattttgatgaacatgttcatctaccagaaataaattatacacacacattgatatggttaggctttctgtccccactcaaatctcattttgaattataatccccgtgtgtcaagggagagaccaggtggaggcaattggatcttgagggtggttttgcccatgctgttctcctgatagtgaatcatgagatcagatggttttataaagggctcttcccccttccctcctcactcattctccttcttgccaccttgtaaaggaggtgccttgctttctactatgccctttctactatgcccttcaccttctactatgattgtaagtttcctgaggtctccccagccatgctgaactatgagtcaattaaatccctttcctttataaattacccagtctcaggcagttctttattgcacatatatgtgtgtgtatgtgtatgtgtgtgtgtgtgtatatgtatgtatatatgtatacatatgtgtgtatatgtatgtatatatgtatgtatatatgtatacatatgtgtgtatatgtatgtatatatgtatacatatgtgtgtgtgtatatatgtgtacatatatatatatatatatatatatatatatatatatatatgaacagagagagagagagagagggaggaagggagagagggagggaagcatggagaaagagagagtaatagcctaaatagaaataaaactagctccaagtacaggttcgtcaacactctcctatcatacccccaccaaagttaatgttaaccacttggagccctgttcttccttagttgtggagtactttagcaaaattttaaatctaattatgcctaattcaacgacagtgctaatttgaaagtgttagaaactgaagacctataataataatgagagttacaaaacataaatagtgagacaatgatgaatgtagtggatgcatgtacgagggctatcatttgacagtagagatgatgctcaaggacagacaatgagtctttcaatgtgtggagaatgtgctgctgttacagtgatgtacaggaaagaaacaaaaactgaggaagtatcagtaaacaaaacactcaaacatatgagtatacagctagaataaaagcaacagtactagatgacaataagcccaatgttaactcagaaagcagaaggtttttaagaatttggggaatactgtggctgatgatacttatgtctcaagccacagatgccatatgggctctgcgcccagttgaatcggcaccacctggcagtaagtgggcaggtccacgactgccaggacatcccttccaacacttgtggagatcaccaggaaggggggagagacctgccttgacagattttcaatgtgggcgaaacaggtctattttgagaaaagatgttcaatagaacatatgtcagcaaggaagaagagatgatgcttagttctaaagctccaaagagctggcttacactccaacttggggaaaatgcatccgggaaatgcaagattaatctcatcttagccattcttttgaatggatggacatgacccctttctacttgaagacagaaaacataaccatattgatttcaggttttcttcattggtttccatttaggattgttcctccccatcttctttctgtgtaggcatcccagttcccaagtgttcatgaagcacgtatggccttcaggggatgtgtctgtatacattgttatcttatggatgcacggttttgtctgcaccttggttctgaatgtctttactcttgagcatctgcccatgggtccccttctcaaggcctcaatttcttgagtttaacactgcatggcccatgcagcttttcagttaagcatctcttgctatgaccaactcttttcctcagtcaactcccacactcttttcagggacaggaaaaatgtagccacttgctggctgcactctgaggcctcaagaaatttagtgaatctgcctttgcccttcttgctgatgaaatactgccacatcaggccccctcttcggaaacctacaagcatctaattttcttgcttcctccccaactttctttttgactcccccccatccagagagttcttatgtctactgtactaggaaaaactcattcttaaggtatggttttcaaatcattctctggtctggactttagctacggttttaaatgaagaaacaacccagagccaaaatataatgaaactatttccttcttccacagagtggaaactgctttggggttaaagggccagtgaaccaaatagaaaaggatctcagggaacacagattgaagagagagaagaaaaaatatgaaggcattgttggttctcttttgagtttaaaatctagtggggattgtaagcacacacacatatacacacacacgcttacacacacacaccagtgaagttatgaaggattttgtcactccaacgaccttgaatttgattatctaggtcagttgttaccaaagtggaatgtacatgcccaataatatgcgtgctaaacagttggggtagtgagaaaaaatactttttatttatcttgttctctagaaattaatattttgattgtatattttatagtgtatgtgatgtgtaagttgtgtctacaaaactagtgtcaatgtaatttaaaattacatatgtctgtgaatatatatttatatagggtacatgcttaaaatgtgtttacttctgaggtacatgaacatttttcccccaggcacagaaagacaaataccacatgatgtcacttaaatgtgcaatgtaagaaaagttgaattcatagagatgtagagtagaatcatggttaacagaggcttgggaggtggagtgagggaatagagagttactgttcaaagattacaaagtttcaactagacagagggaatacattttgagatctatttcaggaacattttgagaccctcactctaagtaataggaaatcattactttagttaacatatttgaatatgagttgtgatgttctatatcgtttatttggattctactaacccacacctagatttttatggcattacctttttactcactgtgaatatcctactcatagacagatgccctgggaacttggacttgaggcacccaagaactgagacagtgagatttgggggcacaaggatctatggataagttcatcttagtgatgataaaatcaatttggcatgtttcacggacagtgtgcattttagaaagggtaaagacttggaaacgggatatttttgagcccaagtgtttccaataaatagctgtataatttgaagcaaataattgattttttgttctctttgtgccctcgcctgtaaaatgggagaaatgtattcctttctcatccttctcatgaggccattgagagtatctaatgagatcagactgtgacatagcataataattctcatttcttgaaggcctattatacactttgcaagcactgtatgtgttgtttctacttctcttgttcgtttttcctggaataaatatccccccctcctttacattggattgccattattcaccctgtaaggaaggcttcatggttctcattttcatctgagaaaacttaggctcagagaagatcagtaacttatctaaaacacacacatacacacacagacatatctatgcccattattcttaacctagtttctctattcaggagttatctctgctgtctctgcttctgattataatctgtgtaagctgatccaagtgacacgattacagggaaattgtaagccctttgagagcagagactacctattgatatctacattttaaaatttgattttagccaacctgtttatatgcaatgactaacaggttagtttgacttgcaataaatattccaaatcctagactaagtaaatttattaatgtaatgatttaacttgattttttcattggcatgtttccctgaagtcgtcatgcaaaattgaaaaaaaaaaaagtatagtgtgtgattctagattgaaattcaggaatcctccagggttaccttgtttgctttccaaatagttcagattgcttagtctgaccaacaaggtccctgacacttggaactctgtctatccctctaattgactttgtccctgatgacctcgcccagagatactcttcaccccagctatactgtgttgctagagtttctctgatatcccatgctattgtttcctttgttctcttcataaggtaccatttcccacccgccaactcctgttttcctgatggacttttgtttcaccttacaagatcattgctaatgtatttattttgagaataaaaagtgtaggaaaggtcacgggacaaagctgtacaccagacctttcccagacgaacctagtgtataatctccctagtccaacatcatggcttaaggcagtcgatagatccgtcttaatgtcccttttgagttttctactattattatatgaggatttatttttgtctgaattcctccctagatttgccctagagagcaatgactatttacagtttattcctctttgtatctcttatgttaaggccagaccttggcacatattctagctgattagaagacgtttgttgaatgaccaagtgattgaacaaatgaccatgtgctctgccacagtccggtcagttctactttggtttggttatgtgtttgccacattaaagttgtagcctgggaagttcagttgtgagatgtctgcagaacatgaaaaattggaataatgaggttatttctaaaattgctataatttaaaataaatagtggtttattccatatatgaatatacactggaaacaaagaatttctagaatactggagattcaatgataacatcattgaaattaaataaataataggattatgctagttactttctaatttactagaaattgaccgtgtgcatggcacgtataatgagtatcatgggatagttacaaaaagtggtgcttagtgagtttctgtggaaaatctcggtaccaataaaacggaggatttccagaaatcgatattcctcaaagcttgacagtatttatgcacggttacactttgtgtgtctttcgtttgaatcaatggaaggaggctataactgaaaattattgttttagtgtattatatctttaataataagagttttaagaatctatcattagaaataattattcctcaatttgtaattctcaacatttgaacaaataaatgctctgtgtctatcagttaatcttgcccatgaagatttaataaagcacgctagtttttacaaatgtgattttagagatggtcattacttggtaaaatattttgtgttaacacttccatgaatatgttctgtgggaatatactgcctccacattgcttgctcatgaagacatgatttttcacatcatcctatcagtattttgagaaagagattgatcccatattctatgagcatttgaacattctctagtatttttgtttaatcattaaaacaacccttgaagtctatgtgctacactggttatttccctcttgactttcctttacagataaccctctatcataaacaacctatctatatttgttgtctccacatcatgttgccagccctgctttaacacactgcacattgacttctagcagcaaaggctcatgggaggtactctcatcaaggacactgatggtcctcatgttgctaaatttggtgggtcctctacagtctttatcctagttcaccttattatggaccactgtcaactctgttctgcttaaaacactctgttccttgcttatatgactctacactcttaactcctttgtgaattcctcatctgcccttccattaagtattgacgacatccttcatagttttgatctaggacctcttttcctcttacttgacattatgtgggtaatcttgtctttgaacgcaattaccattcttatgttgatgacccttaagctataattccagcccaaatcatttttctgaggaagctacaagaatacacaaatgtctaatagatctctatttagatgtccctcaggtgcttcaagcttaaaatactcacctgagctcatcacctcatctataaattctgcttctcctccctggctccctgatttatttaatatgaccaccatccacttagttgaataaagcagaagcctggacaccatctatacctccaattaatcactaagttttgttgttaaatacgttcttacattttctctctagaatgtcttattttccccatctttacacccaaaaccaaaagtcagatgaccctgatctcctgcttagatttcaaaacactatctcttgcctagactctggaatttcagtcttgctcctctccaatctatttctacaccctagactctggaatttcagtcttgctcctctccaatctatttctacacaaaagctagagtaattttttaaaaaacaaaaatctgaatgtgttcattttctgcctaaaagccttcagtaattcttatttgttcttccagggatagagtaacaactttcagacctagtttattagctagttctttaaccacaaaggactctctcacttgtctactccccctaacacacttcgccctaacctttgccattcctccctttcccttttccttcccagatggacttaagtcctttcagattcttaaatgtttcttcctccagtctcttacatctcttttccttgtaactctaaaaactacttagcttacgcaaggaaaaaggtctgtacaattcccggaatcagcgatcctaacgttccctgttgtttttttcgttgggacatgaattcattcacagtggctctaaacatcaccacccctgcctatctctcccattcctactttatctgagcttatccatactcttgaagacttacatattttttttctaccaggaaatcattactagccttattatcccactgtccaaaccaataagtctgattaggtatctgtatatatttaatattactatatgtgtttttctaacactctagtagaggagaaggtgtatttctttctgttttttagaagcctgtatttctgctattatagctcttaaggaactctcatgcaattgcctactagaatgtaagttacggtaggataagaactggatcagtcatatcacacatccacatataggacctagcaccatatctaacacacagcaggtactcaatacatttctttcccaaataactaaagagtttaaacaaaccaaaatgattaaatgagaagtaactgttttggtaattcttgtgtccttactagagtctaaattgagtgatttttatatcatcagtttatactcccctttcccaaccccaattctttcttttttaaattttttaaatcaaatatgccttaaaacttcaggatcagttgagtaaaatgatgcttttgtcgtcttttgcaaaataattgtatttcagaattttgatttagatattataaacacacctaaaataatagctttagtcttaagatgaagtgcttcttaaactccctaagatgggttggactatggatatgaacatggacaatatcacattaatttgtgtacacagttctaacacagggtctggcatataagaacaagtcagtaaatagttgttgaatggaattgaaaatttaagtagcaaataaagtattttgacctacaaagcaagaaatcacatttttctttttgtcacagttccttaggaagataattaattttttagtatttaaggatgttaaatatttattttatgttctatttactaggcttctttttatgaaaattaattggtgaaaatagcgtacatatcttcctttaccagaacatttacattttgggcagtaacgctggcttttgttaaaaaagcaaaatatgtgtgaaatttatgtttgagttgatttcaatgcattacatttccattttaaatcttctttgaaatactctatttttgacaccatgaaactgtattagatcttagtatgttagcaatgttttgcagttttagagccataattattttaatgaccactttcagcatatacgttttctacaggaaaaataatctcaagaacatgaaaagtgaaatctatattttgggtttcaaaatgatacattttagctaaaatatcatagttttaatttctcagtgaaaaatatagtgtggtaatttatgaagagactcagtgtttaaaaattatgactctatagtcaagtttatgtttataggacataggttattcaattacatttaaaataattaatttagaaaatgtgatcaatgtaacaaattttacctgttcttttctaaagctaaatttgttgtttgaagtgtttcttctaaaatgctaatgaactatcaatttaattgttgagcttagagttagaaacttaattatattgccagaaataaagaaacaaatggatcccaaaagattcacacattagaaatgtatgccagggaaatgcttttgaatgtgttcaagtcatggcttctaactcgtaacttataacttgtgttatgtctggcttcattcccttaagaaaaaggaataataatgccttcggagagcatcccagctgtaagagctatgcattggtgtctaaaaaagcttctcactcctcataccatcctggtctgggaatttaaaaaattgtcatcttttgataatctgtatcacatagtcttctgcatagtcatatgaggttagaactgccccataacttttgcagggcctatagtaagtgtgcaaatggttgcctgcatgccacatatttaatatttataaggtataaagtcaacagactattaaatatatcctatctgctttccttgacaattatacaatcataatgatatggacatctagattcgatttagaattctctctctctcattttctttttcttctttctttctttctctttctttctttccttcctttctttctttctttcttctttctttctttctttctttctttctttctttctttctttctttctttctgtctgtctgtctgtcttgtttttttaaatagtgcaagcagtttattccctggcaaggaatttggaaaaaactcaaatagcaaaccacttgatacaataaaataaattccttagagttttgtactggaatgaggcagcttggttagagctaaccctaagcctgttatttaggatacattggcttttcttaagcttaaaaaaaattttactgtgttaatgacatttaacatgagatctatcatcttaataaatactacatgcacaatacattattattgactctaggtagaatgttggacagcagatctctagagctaattcatcctacttaactgaaatgtaatgtctgttgattagtaacttcctatttcgccctatccccagcccctggcaaccaccagtccagtctttgattttatgagtttgactgttttagataccttatttcaagtaagtggaatcatgcagtatttgtctgtgtctgtcttgtttcacttagcgtaatcttaaggtccatccatattgtttcatattgcagaatttccttttataaaggctgaatagtattccattgtgtatatataccacatttatctattcatctgccaatgggcatttaggttgtttctgcatcttagctattgtgaatctgttgccttttttccctacctcctttactccatcctgcactgtgaggaactctgtgcacatagatctggtcgccccatttcccacccacatgttcaagtttttcccactcacctcatgcaaagatttaccccttagccatacccagtaactgactttgaaacatttgcccagggagttgagggattctgaatgccagatcatgggagcggggcttctagtgagcatgttggcttggtcctacagactcctaatcagagctttgcctttgaaagcatggggcccaagggcaaggaccctacttgttaaggtctaaattttttttctgaaataaccacatcgagcttttatgtgtagatggcctaaattgggctaacccagaggcagtgacactcaagtagtttacatctaagcgctttccatgtgcttcttttcccatttctgttacttcttacaaaataaaaaatcagcatctcaattaccctgatttgatcattgagcaatctaaaaagtatcaaaatatcacatgtagcccccatatacatacaactgttatatatcactataaataaatatatacacattatatttaaaaatcaatactttaattttacatgtttaacaaatcactagcatatacattccagattgaacttacgagggatgtggaaaagattcagtgactaaataacaataaagtactctaaaaatgaaaatgtgaaatggagacagtataaatctaaaatcatatcacttatgaagtattgtttcaaataaacaataaaatatatcttcaatcaatttaattttattttagttgtataaaatctttcggtcagcattaacctaattggaacactaaataggtacatctaaaaaatataatcccccccaaaaatatgtagctcataagagataatgcattgaacacagataatattggcgttaaaaacagaactctaccacatttgcaacgaaatgtttatctgttcttcctactagaaaataataaaatagttctgcatgagcttgaactcgaagtattaggtgtacaaagaccttttagtgaatgaatgctagctgaaaagcaaattttaaatatgaaaaattagcaagacaaacatttgaatttgtgggagatgagtaaaactcctataaaaatgaattgtttagtgttaaacagattgtgtatgaaatattaatggcatattgtcctgagctccccttccgctgtttccatgtagatgactgaatttcaaacagaaatatgccaggaatgattacgtgaatgaatattactacatgagattgcttaaagagtatttcttcttttgccttctttttactttcgttatttcatttagtagttagaaaatactgtctacaaatatgtgagaactgcttaatttatttttgagacattaattaattcaactaaactatattgactgtgtgagagagattcccttggtgaatatgtggatttttgcggtggtaagaactctcctctggagcgcaaatggtattgctctaggaataaagcatatacctcaggcccagatgaaccagtgcaatctacagtaacaggttcaaagatgacctcatgacctactgtggactaataaaaatcaaggagacctactgcaaaggtttctgggaaattctttttctcttgcgttgaactaagtaatatacatatgtgatagttagagctgcagcctttgtaataccatgacagaagataacctgaaataaggctgacagacacaagagggagacctaagagtactgagagatatggagcaggaccccctgattgaacttcacttgcagcccccttctgcagttttcaatgacgtgaaccagtagaatccctttgtttactgtttttgattaatttgagtgcagctttatgttatgagcaactaatagcatcctcactgtcacaactgccctctatacggcaggcactttgtgatactaaagaaagcagtatacagagtagagcccagtgaataacagggcagatgttgcaattaaactgcctgtttaaattctagctcttccactagctaacttgtgactatctaagtaatttaaccttcctataatcatacctatcttgaagacttgttgtaagatttaaagcacaacagtgctactataaaacaggtatacagtaaagcttagctacttttttattaggccatatgatatcatttcattaaaatcttatagccatgctataaggtattatgatcctcaatttataaataagacagctcaagttttggtcaagtgactttaccaaggtcatagagctagaaaataatgattccaagttacaagccaaacctcttcaatgccaaatttacatcatcccccattacttgaagtgtaagattcacatggacagaaatttttgactgtttgatcactgctatctccttatcatctaaaacagtctctggtccatattaggtgttcaataaatatttgtagagtacataatttccttcacagactccacaatctggtgaaggaggcagacatgtaagagaattatttcaggattccacagttgatgctgtaacagagctaaatataatgaatggaggaggaatgaataagtttgtctgggagcaatgctatggctattgaaataagtcttgctcatgctttgattgaaatggtggatatagatcacacaacaaataacaattagataacagcttgttgggagaaagcgaggatcagtgtttgccataaacatttctcatagctaatgtcaggtgtttgatttctcaacattttatatctttgactttgattttctctgtttttattttttaactccattctcaagaagtctgcacataagagtttcaacatctagcacttcataactccgtcatctcctctcaggcttagagcaaattctgagacgtggatttatcgtcgagtgatttcttcctggcattttatctctgagaccaggatctggttgctaagcatgtagacatagaaatgcatttcttcattgaaccccataggttcaaactagtggataatgagcacaatgtcaatgtgattatttgtaatgggggaaaggttaccggagaatattacacgaccatccacatagactaacattttcctcatgactaagtttacttagcaaaacaaattaaaaacagaagtttgtttagcagcacagaattgaaggaagacaaccagatggttatgaggaagattcatccaaactatgccagaactgaaagaaattaagttcattcagtacaagaattgtctagaataagagaatccattttgtgtcagcacttcccaagttcttgttaatgctaccttaagttcaattcaaaccaggcagcatttattacgtgttgtgctgggtcctaggaggaccgcgttttaagaacttactgtgatcttctagatcaagtttttatttcaatatttctacctcatttctgattcttaggtgttccttatttcccaatttatcccctgcagaaattgaggcaataagatgtctatcttattgcctatggtgttgattatttatgttatattctgttttgtgaagtttgacctctacctaattaaattacattttcaattgtatcttggattgatttattcaataagtattctttaatatttttgcatgaggtcggtcaggtttcatcagacattaggaattaattataaaaatctctagattggtacttggagcttaaaggaataaggtggtggaacgttaaatgaggaggaaagaaccagcagagctgggataaaattcatctctatcatcttcccacctgcttgatctctggcatataatttactatccgtgaacctcaggtttctcttcagaaaagctgcagggttgttgggggaaataaggcaattcctgggcttcagtatgttcaaaacagagcattaatattattatagacttttgatgatttacacaattttagctttttggcaagacatatttactagtactaagtaaaagcacgttgactttctaaaatgaaaatgtgtatgtgaggatgaagaaaaagaaagtgttttgtttgataatatagcattataacactgcacaaaaaaaaaatggtatatgcagagacttccatcacttgcttatgatgccgcattgggatctcattaataagacacttcctcagacacttcctttgtgttcaataaatttcaatttcctcctttccttcagttcacttcaagaaggacggcagcaactttcttgttgccaaacctgacaaatgttttttagtgctgattatactcgagcattctgtagcaaaatgctgtgggtgaaaatgccttccttcttaagggaatttagcttctgtagtaccagaatctccttgttgaatgaacatgtactgcctaagtcttagtaatccctcctttttgagcccattttctggcatctctccctttaatattcctcaaaaagttggatttttcctggacttttcatattacagactttcctttggtcatcctcatccattccgtgattccaactacattttccctccatcctggcatcttctttcttccagacttgtatatgcaactgcttccattcatacacttgaccaaccttttaatttctataagatcaaaaactcagctcacaagctttcccctaccatcgagcggggttcttcttttgcttctttgtttcagacaatggcaccaccatactcgagtaaggcacgttcatttatcaggtcctaccaaatctacaataaactctcttgaatttatccacttgttttcatttgaacagtcatttctttacctgggtagcctgcaccttctacctgcattgattcagcagtctcttcaccactggctctccctccctctcctgcctctcttcttgctccttcaatttattctctactcttcatagtgacttttattaatgcaaatatgaccttataactcccttgcttaaagacccactcatgtttgtctttgtatccataacttccggcctagggcttaacgcatagcaggtgctcagtaaatctgtggtagatgaaagaacaagttgtataaatactgaatggtctgatgtgctctttgttgtgtcaagaaggacattttgcagtcaggatagctacatcagtcctttagtaggcatttgacagcactcgcattattcctcaagagaagatggatgtattgattctgtatttcaaatgacataacttttgtgaaataagaggctgccacggtaatctgagggatctctcaagttcaagggactccacagtgctttgtgtaaggtaacaggctaaagggttcagtcttaaactttcttaagactgtagttcagggttcctatggtggggctataaccctgaattacatcctctttcatttcatgctgataatgagaactacaaaccaaggggtattaggaaagaatccaggtttgatgcagggaaaaataaaaacaactgataatctctagtgtccccaacttcaagaattcctttcttctttacaccaagctttttttctctgccaggacttactttgtcttctacatgtttaagggagaaaaatgagttaacagaaggggaggtacagcatttctatttacttagatgctagagaacaggatgaaaggtatgaaaaatatgaaagtctctctctctctctctccccagccttcccccgcttctctctctctctctctctctctgtgtgtgtgtgtgtgtgtgcacgtgcgtgtgtgtgtgtgtcataatactcaacctttcttttctttcaagcatatgttgtggcagagacaagtgtacatcaaaattcgtggtccctctttcatagtatagagttcttgctaggatccagctgcaagccagcaactacatttcccagccccactggcatctagttagagccatgtgactagttgtgaccaattgaatgtgagtgggagttatgttgcaggcataccttttccatcttcttacttcccatttgctaaccttatggaaaagagtcccaaagacctaggagatgaaaaagcctaaaatggaaggactcagagtccctgaattactgggtagagaaaagctgtttgcagatgggaatgcccattttgtagtattctttcttttcttaagccactaaaattgtgggatctctttgttatagctactggcattaacctcttacgtatacatacagctatgtgctacaaagaggaatagatacattttttaatcgttgaaaggggagaaagaaacatatttaggaggaaaataatttagtctctacaattgaaaagtgttttatgaataatattttgttttggcagcatattaaatctcaggcagctgaactacattaattttcaattctctatatatgtttttgtcttcagggtttagtaacactgatatataacagtttctttcttttaatttccaaatttaaatgtctaagtttgccttctaggcagaaattaagtcccattgtggaatgagattggatcaacacttcaccaagatcattttagttctttgtaatcttaaatgaaataagctaataaagcattaaattagcatgttgtaaaacttcgtgaagttttaatatgcttctaagtggcagctcttagcttattatctctaaagctaaagtcaaaataaatgtctcagttgatgaaatggagatgaggcaacattttatcaaatttaacaaaatattttatatctgaattataaagtccagattatctagtaattatcatataaatgtatttaaccagacatgcatttttctctaatcagtagccctggagtctttggaccacaaatgtgccttatctcaaatgctttaactgtgacattttgctttagactagctcgactacttctacagaaattatacacttcattcacattcatccagatgaaaaaaatacatgtagaaatgatcataataagtaacatttgtttaggatttcagagtttacgaagggtttttctattcactttctcacttgttcttcatgtaaactggtttggtggacaactgtcattatccctgttacctggagcccctgggtcttagggagacttcttgacttctcaaggtcatgaaggtgctaactctgaccgtgtttttattcctactgtgccacacttctcaggtaaaaatcatattgcagacactttaagagaagtacttaagaaaataaattcctccagagaattacatttaagttgtttcattaactgcagtgcataaagaaaggaaaagtgttcccaaacccatgtagtattttgctattgcttatggtaatattctgcacacctaatattgtcagcataattttccatgtaacaaaatgtcctaaatcagcaatgtccaatataactttgtgtgatgataaaaatgttctgtctctgtgctgtccaatacaacagccactagatacacatgactactgagcaatggtaatatggccagggacactaaggaactaaatttttatttaatattaaataacgtttaaatttcaaaagccgcatgcggctagtggttgtcatcagatactgcagttatagaaaattagaatttacctctttaaatactaaacctatttttaatagtaggatttttaaattaaaatagttctaagtgcttttaagtgatacgaagtcaaatgcaagatttctgttttaatagtactctcaacccagagacaatcttcatgcatccttatacatgttctttgttgccttattctagttttattttaacattaaatgcctctgttctacttgatattgacttgcttcagagaacaccaagtatagtggaaagaaacacacacatgaggacttgaggctaccaaccaggttcaactaaatgcactctgatttaattgtagtattgggatcccctgttgcatttattgaagaagaaaaaaactttgcaaccaaaaagatatttgaaagcaactgttcttcttggacacatgatccctcataaagtggggcttcctgcttttcagagacttaatttctgttcatattcatttcagcaatagtaataatgatgatggcgatgatgataataatcatgatgatgcctaagtgttgtagtaatgcttcttctgagccagacgttagtcaaattactttctctacattaattcaggcaatcatcacaacaatcccacaggacaggttttattattatacttatttagctagcaaatgatataactaggttaagttacttgcccaaggtcatactgccaagacagtggctctagtgtccctgcttctgaccatatgttatgctgcctatcctagagcttttctcttctaaaatagtaaaataatatattctttgtttgtttcatacttttttttttttttttttttttgagagggagtttcgctctttcgcccaggctggagtgaggtggcgcaatctcagctgactgtaacctctgcccccaccaggttcgagtgattcccctgcctcagcctccgaagtacctgggataataggtgcccaccaccatgcctggctaatttttgtgttttcagtagagacagggcttcaccatgttgaccaggctggtctcgagttcctcagctctggcagtccgcccgccttggcctcccacagtgctgggattacatgcatgagccactacacccggcccatacataaatattttaagcgaagtacacatgcatgatcatcatacttttaataatttcatttaactgtttccaaagaatgttagtatgaggttttctttttttctttttataatttcaacttttattttagattcagcgggtacatgttccctggatatagtgcatgatgatgaggtttgctatatgaatgatcccaccacccaggtagcgagcatggtaaccactagttcttcaacccttgcctgttcccttcctccctccttcctctgtagtccccagtgtctattgttcctgtctttatgtccatgtgcactcaatgtttagctcccacttttaagcgagaacatgcagtactcgttgtctgttcctgcgttaacgtgcttaggatagtggcctccaattgcatccatgttgttgcacaggccatgattttgttagtttttatggctgtgtagtattccatggtgtatacgcgccacattctttatcctgtccaccattaatgggcacctaggttgattgcatgtctttgccattgtgaatagtgctgtgatgttatatgtactttttggtatattcaaagagaaatgctattttcctcttgacatatttatgtcaatttaacatatttatgtcccttttctttttaggagcaccattctcttcctttaacattataaataaaatattttttgcttttctgtttttgtaagtgcagttttattgacagagtgagacatacacgtcgatattgtgactagctgcatgtcttctattatttagaggtctcactcaaatgtagattatcaaattctgttagtgaagagggtagaacagcagaactaatgctggtttccttctctagcattatttgatgataaactaagatgataataccccccaggtcttagatacctgcagtaggacaggcaccctacatttaatgctcctaggaatccttcaaagtgatagcatagttattatacagtaattgagaaaactgatgttcataagttagaaatttttccgaagttgcaaagaaagtgaatggaagaattataccaagttctggccgggcgcagtagctcatgcctgtaatctcagcgcttcaggaggccgaggcgggcggatcatgaggtcaagagattgagaccatcctggccaacatggtgagaccccgtctttactaaaaatagtaaaattagctgggcgtggtggcacgcacctgtaatctcagctactcgggaggctgaggtaggagaatcacttgaacccgggaggcggagtttgcagtgagccgagatcgtgccattgcactccagcctgggcgacaagagcaaaactccgtctcagaagaaaaaaaaaaaaaaaaaaagaggattataccgagttctctttgattccaagcccaaacaaatccttttttgcaatatatgacattgtttccctgtttgcattccccattctgtgtatcacacatcctgtggcctgatcaaaattcattttcagattctgaatttattttccattgaatctatataaactataaagacagaagatatatgtatgtgtgtatacccacgtttctcttccagtgtcaactgataaaaatagatttcaaagtctcaataacctttaattccctttttctcttaaaaattctttagaacttgtacatgacattctgactctagcagattttagaaaacagagaggccattagatattcataccttactattcagatgaagtattcaatgctaaattatgtaatttatctgctttgcaaattgtatggtcagattgagttccacaaaggagagataatttttaatataggcattctgtagcttccctaattattgaattagtttagagcaaaatccttaaattgtatcgttgctatgctcaaattttgtatacttgtccacgtaggctatattaagatttcattgaattttggtttctttctcagtgataattcaatatatcaactcaccactcagatttgcctttgggaaaatccaggccccttttctggatttttagagcagattttaaaaaagtgattctgtatatgtgttgaaattaaccacatctcattgcttttgaatgattgaggtaatgtatacctactactttaaaaaaaatgacttacttagaaggtgtccatagttttataagttccattgaactggtttatattgtatttagaaaggaaaactactccttttatccttaagggtgaaaacctggattttattatacaattaacacatatttattttttattatgaaatatatcacaatataaacgtttacagggagtgtttaaagtggtgttgtccaatggaaatataatgtgagtcaaatacgtagttttcaattttctactagccatattagaaaaagaaacagagaaattaatgtaataggatactttatttagcctagtatatccaaatcacaattatttaaatatgtaatcaatataaaaattactaattatgtatttaacctttttctttagtaagtctctgaaatctagtgtatattttacatttatggcacattgcaatttgcattagtcacatttgaattgttcaatagccacaggtggctaatggctaccgtgttggacagcacaggtttaaagaataatatgaacatctgtgttccaacattctgagtttcaaataagaagaacaccatcagtattttgggagaagctccctatgttaccccttgctaatcaccttccttccccccagagccaaaagtaaccattatcttgaatttctagtaaacaatgctcattttttaaaaaacgtatgttcaacacctgtatttgtatctttaaagagtagctagttttagtttgcctggatttgaactttatattaagggaaccaccccatctctaatcttctctgtgaattcttttctctcaatactatgttttacatatttacgttcatcaatgtgcaactcattgtatgtatataacacaatgtatatattttacatgcgtatggacatttgggttgtttttatgtttttgttcatcacaaaccacaacacacatgtgttcttgtatatgttttatagtgcatgtttaaaaatttctcaacagtattcgctagtagtattgtcaggtcatagggtatgcacacataaatagaaatgattgattagctgcaatttgtagtgcacacatatttgctatgtaagtgatccatgtttaagactttaactgaatttaaaaaatattttattggagccaatctaaatgagctaagggtttgtattgtttacataagcaaagattacacttactgggtcaattcggttgattaactttggatatataaaatatatagctagttgttaaatagatataattattaattggcattacttttgtttgtatataaaaatttcaaaatatccatgacttaagcaaggtaaacacccactgggtggcttaagcaacagaaatgtatttcttgcagttccggaagttgaacgtctaagattaaggtgatgacagggttggtttctggtgagtcctcccccattggcttgcagatagccgccttctccttcatgacctttcctctgtgtatgtgcatcccttgtagctgttcttccttttatgaggacattagacttattggattaaggtcctacccatatgaactcatttaaccttaattacccctttaaaggccctacctccacttgcaggggttaaaacttcaacatatgaatggggttgaggagacctacttcagtccataacagtttctatattctgaagatggtctttaattaactaaacagttaatgttactttactgggaatgtcttttggatgggggaataagctgatgatatgagaagggttggtgaatttctcataagtgtgaaatttgttgggccggcccagcatgattttcaatcaaatacgctttggggacaagtaggttgaatcactacgagaggtttaaaagaaagcaagttgtaattgcaacttttaattgaaagaaagacaggctttgttgatgtgccagcaagactgataactggctttaacgtagatagtaaggcagcagattcaatccactgatcgtgatctactagtgaatttcaaagccttatgcaatagaactacaaaccctttccttgcccaccttgcaggtggatccataggcaaaatgaacatttgcaaaaaagccgctatgtttcagaatttgtgctagggctttaatatctataatttctccaaatcctcacaatttaagaattaattcaacttagccccatgaatagggtgaaaattctgagatttaacaaactaaaataagttatctgaagacagacaaatagaaagagttgagatattctatttgaatgtaaaattttcaaaaagtagaatgacagcgtcaggaattacagtctcagtgttgaacacaagacttaggaacaaatttgctgcatgtaatttcattgagatgggacaaagtacagcatacgtaaggaagttttagaacaaataagataattattttacgagctttgaaacatgtgtaagaaagatacgaataaaagtataatcacatttgactaaaacatgaataccttaaaactgaaaagcactgagattatcattatataattttgaatattttaaaccacaatgctttgggagtgcactgtaatattttagaattggaattttaacttactggcttaaaaagtaatgtactttgttttaaattcaaagattatcttgtaaattcagttcgatctattgaaaaaattataaaattcggcaagaagccaaagaagaacaattatgtagctcaagataattaaattttcatgtttggctttagaaatatattcgtcgtgacatagtacatggtaatctagtgagcccagacaagtagttttctctttttgtcaaagggaacaatttgatgcgtgttcaagttgcttaaataaaattttgtatgtgctttctcatcacaagagaacaatatgatttttgaaattatttttactttataaaagaaaaaaaaaagccctcacagagaaaaaagaaaaaaatgatgatgtctttgaaaaacaaagttaatacagctttacatatatttgacctacatcagggttaatatttttcaaggtgaaacattagatgctggaacttgcaaaaacaggcaatcctcctttagatgaaacggacactctaagggttaattcattcactgagacctattgtgaagtaagccctacagagactgaaaaagttaaatgcaactcacaaaagttgctagaagagtcatgatgttaaaataaaataagtacacaatgtatgctgcaagtatacttagagccatgctaggtgcggttgagaagttcaatacaggtccaagataatagctgcttctcctatagaacatgtcttctcattggagggataagacctgtgtctatgaaacaggcgtaattacatagctctggaactatatatgccgaaataaatgagacagtaagtgttattgtactataaagaatgaagaaatcatgatgagaagtaacagttaatgaatgttttctagaaagagtaggatctgaattggccttaggttgtaagcagagtttatagatagagtagtggtatgtcagagtcactctgggtgcttaaacatacaaatccccaagtctcacccaaatgtgtcttcagatgaaaggaaaaaacaaatgacttgagctcccccgcaaagaacacgggtggtatattgagcagccaaggagtgaccagagtggcaggcccatgttgagggacaaaagaggacaattagaatatgattaatacaaatttacagtgggatgagttgttagcctgaggagcttgaatgtgaacctctgtgcaaaaaggagtcattaaatacttttgaaaaaggtgggatgggaagaaaatgacattctcaagacaattagatcgaacagtattaagcatgctgacttattaagttatgcaccttgagagggtggaatgagggaaaagggtctttatctggagtaagacaggaagaagctaagctgtaattcttactggactgtaaattatgtgcagatatattatctgtcatgttcgtgggcgcattctcagtacatagcacttgaaacaggtactcgataaattgtcaaatggatgcatggagtgatttccatgcaaaatctaatattgtatagtattagaagggggaaaaaagcatggcattatgctagcagaaatgtcatttggtattgaggatgaaacattttcaacagtttgcaaagccatccactcaaacattctgtcactttccaataattttgaaggatgttctttctacttctaccttattacacaatgagttgagtaagataaagaagtcatgtgcaacaaaacagagggagattttctgaaaggcactacaccaggaagttgttgtactcttgcttcatcttgccatcttggatatacttctggcgctacctccaggccagttcctcgttacatatgtcatttacttcccacatgctagactcaccgagttaatcattttgctgcagttaacacattttagcagagtgtaggtttatgggtgagaaggaaatcaatgatgtttcaatacagggttcttttcccatcccccttatttccacttagaactgtctctcaagtcttaatttgcctctaaacttttttcccagcttacattcttttctgaaaaatgcaacgacgatgccaatgtttgttgacctgaaatacattgtaaaacattcataatactttgagcagagcttccaaactcccatttgcctcttttatctcccttaccttggcccctttttgaaggcaatgtgatatttaatccgtttctattgatgcttcaaaattattgaaaaactggtaattgtatttttccctttacttatcagttgctagttgacaatgagtgtttgcccaaacaataaccaatcaaaaggtaaaaaggagattccagacatatctgagaagaaattctttggaagaagcccgtaaatggaatgggaattcaaacaaagccgtttccaaaagaaatactaaatggtctctaaatgcaaaaggattgctccccaagcattttatgggagcataaaaagctcccaacacattttatgacaatacttctactcaatgacttcttgtgttgacatatttgttgcactcgacgttagtatttacagcttcttatcccaaatatttacttaactgaagccctgatgtttttaaaaacttttcatctgtgtttaacagcccattttacagaaacttatttgtttcatcaggcagatatttactgagaacttgcaagtgccatatattctaaaaatgctgatgataaaactgtgaacacaatagattctcatggtgcttatggtcagggctagcacacacacttgtgaaatgatcactgatgatcaaaggcataaacactacatttggaagaaataccgagggatccagaagtatcttggaaacactagcaagtatagcagatggtgggattggtgcttcaaagaacttcttgtggaagatgttacgtatgtaccttctctgtgccaggcactgctaggaagtgctggagagaaaaagatgtgctagataccgcctctgtcctatgtgcttgtgctttgtggggaggtgagtaggataatcccagttctcatgcagtgtaatgagtaccatgacggaaatgcactccaagaactaggcagcatgaccagagataggacatttgagaaagacttcactcgggtggtactatcttagtctgggtgctaaaatagatgtgatagatgagtaagggtgacccggaagcaggagggaaagggaggggctttcagaacaacaagtgcgaggacattaaggtgaaatagagtataatagtattcccagatccttgggattgttctccattaggctaaaacaaaggtgttttctcttctttaagatttcatgactgcagattgcataacagaaggtcatttaatagacctctaaactgaaggaattcttgaattaaatcacaacatatcttccatggccagagaaaccattgcctccttatgtcgacattactaacagcaccagcacctgctgctcaggccagcgggagggttgggtgttgctgcctaggtaatgctcaccaactgatgtcctgccatgagtagttttgccaagttccacaaaaaaaacttagtgttctatcagcatctaatgagaattacagtcattagttaaataaaagaactattagataaggagcagaatgaacaacacacaatccatcagcttggtgaatggtatcagatggtttctgggtgctgggcagctgtgcatccaagtagacagggagaatatatatgtcctttgccttatgtacttgtttctctaatccaaaggcacagcaatccgtggaagctgctatgataaggtgtttagtggtgaaaatgtcttgaaagccagtagattattaaagtgatgtttttaaaaatgcagatggagagtaagtactttttatctagagtagtagttctcaaagggaggtcccgggatcagcagcgttagcatcacttgggaacttagacctgcatgggccccattccagatctcacttgaaaactctagggggtgtagcccggcagtctttgttgtgaccagctctccagggggttctgacactccaaatgttcaagtttcagaacgctactcacaggccatcatgctcggcatcacctgaaagcttgttagaactagaaagtcttggccccaccccaagcctactaaatcagagtttttgggagtagggccaagaaaactgtgggttaacaaggtctccaagtgattcttattcatgtcaaaatttgaaaagcgtcgatcgaactgttggttctcagctttgattgcgtatctgaatcacctggggagacagttgagctattccgggcccagatcacatctagaccaattgaatcagaatctatggaggcaggacccagacatcagtattttaaaatatttcttgaatgatcccagagtgtagctaaggttgagaaacactgttctaggattaaaggattaatgtgtttgagagtatgttaagatcttaggcaaatcacaagggtgttaagaactaccatcttcgcaaaaggagaatgtgcctcagatattctggtactgctttgattttaccttcagtagtcttacctattttgagtatgcttagtagtactaatatgaggcttattactaatatgttaaaatttgtcttttaattaagtgggtctaaacgttttaatctttaatctctgacccaactagaacttttctaaacattttcataatagtctccaccttgtcttctgaccttcacttatgttctttcagggttcttcgtgtgttactagtaatagtaatggcaagtgtttattgaacacttactatgtgaagattctaactggcttttaataatcacatcagctctgggaggtagaaggtagggatcctccttgcttatcaggtgagaaaactgtactatagagaagttagcaacttttcccaggtcataatatgtgacagctaaagggagcataatggttggaataaaataaatctactctagttgtaccgaaggctcatatttgtctcacgtacttgatttggtcgaggcccaaggggtcaatttccaatgcttggattcctggatatgtagagttgtattaaaaatgctaaaaacctattatgtatcatacaatcatacatatcacctaaagtattatggaaatgaatctgtattattaagggaaaaaggcctgtgtgaagaacaactgaaacttcattttaattgaaattaaataacatgcatcatacactaaaagtgcacgttatgaccccatgaattacttcaggtggctttgattcatgttacatacactaacaaatatagaagagtgatataatgcttcttaattaactactaatggaagtttactatttaactgcttcttatgtaagaatgtaaatgttttctgaaatatcagaacttttcattaggaagcacttttaaaaatagcaaaactgatatgcactatgatttccatatacattaaattgaacttgtaaatgatgttataaattatagaaaccaaggggatgttcaaattagatatttgtctaaataaatcatgtatggattgaacaaatactcattgagaaataaatgtattccttttctttcaattatctaggattccttgtttatctcttcagaagcaaaatgtcttctgtccgttttatttccagttaaacattcttcagattatgtaaataagttaacttccaatcctcttatttctgtttatctcaccactcttctaatttagacgtgatcaatatcttatctttttgcatttcatagacatcaggatccagaataattgagtgagctcaaaacaacaatggcaagaatgatgttttcagaaaactcagcaatcattcgtttaataaatattcattgcctaccaactataagcaaagtattggctaggccatgtggggtatacaaaaatgtattaaatatggctcattctccctaagaacttacacctattagacaaagtacatgcataaaaattataatgtataatagaaaataaatacaagccctagaatgcacagttgaagtacgatttgcatttattataaaaagaaagatgaattggctgggcacggtggctcacgcctgtaatcccagcactttgggaggccaaggtgggcagatcacgaggtcaggagttcgagaccatcctggccaacatggtgaaactctatctctactaaatatacaaaaattagccgggtttggtggtatgcacctgtaatcccagctacttagcaggctgaggcaggagaattgtttgaacctgggaggtggaggttgcagtgagccaagatctggccattgcactccagcctgggcaacagcaagattccatctcaaaaaaaaaaaaaggaaagaaaagaaaagattaatttcctgttagctaaatcaaggaaggcttcatggagaaaaaaatatttcaacacacacttgacgtagcagtgggatcaggctgatgttagggaagaatgaatgacattctacactgagaaagagatattcagtatatatatgaagagcagtagagaaactaacaagtggaaatagactcaatttacaatacttgcctgcctggagtactctatacgttgactgtaagttgcagtttactcagaacaatcccactttctacttgtttatcctatgtaatcatttattgggcctccttttgctctcaaaaatatccttgtttggataatagattatcactctgttcctaaatgaactgccctgtgtcctatcccagtaaaagggtgcattcgggcccttcgtaactgcctccactacatggttgattgaaaccagagcttggcattaagaagttagctgaacaatcagatttctattcttggaaaacccaagaatttcagaatagatacagaagctgtatagctttaataacatgacagagttgtagccttgaaagctatgtacaattcagaattatgagggagaagaaattgaagaaacagtagcagccgggtaaatgcagaaacaaatgagggagacacctagggggtgactgaggcacaataatggaagagaagtgcagtgaaattgcttgaactcttactgatgagatttctactgttgccttgaatccaggaccacctatatgttcattctttgtcatgctcagagttatgacagatgctgttattgaattccccagagactcccttatcgtctcacctcaaaccttacaataatcccttctatctttctatccatccaagctggcttaagtaaagtctatgatccatattcctagtaaacagagaagggaaagagactgaaggcaaaggccccaattagtaggctattgcaatatttcagggaaaaggcaatggccatcacattgttgtcccaggaatgagaatagaaatgaaagaagataatgaaagttgaaaggactgggggggcttgacaactgtttagacttgaggagtcagataaaataggaagccaaagataattcagaatattttgattttgattttcatcaccaaataagatagtagtactatgaagaaaaaatggttaaaaaacaataataataaagagaactcctccaaatagtaccaagggagggagtttaatagaggaaattaattccgtaggtgatgagagtcctgagaagccaaacgagaaaagatcaaaacaacccagggattggcagtcgcaggaagctgttctcacttatggctggggctttaagcacaaggtgacatgagatttcagaatttgaagtcgtctggaggcagctaggatcaggtggggcctgtcctgttcggcaggacctgcaaccacaggaggaggatgcgtcaagcagaaagttggaacacaagaggggattcagccataagccacaaaataccttccagagcagagagaaggagaaataccctgaattccgtattttccctgccatttagttccctgctattgccacacattgacgtattccatccagagaagtccattggcatatgagtctgggaaatgtagttcccagggggacatgatcttaagggaaatagacaatgactggtgcaacaactgacctgtgtgaggcaggagggaaaaaacaggaataatatagtttttctctagatcccttcatgcacaaagatgcaaaagaaatgtgttggcttaatgagccattctgggtggccctgtaggtggctgtcctacgaataagatttttagacaaaacagagatgacttcaaatgtcacaagaaaagtatcagacaggaattaatattgacttgatctgtcacaggcgtcaatgatttgcattaagccaacgatcttcattgttaatgtctgggaaattgccagcagcattacgactacttgtgtggattagtgtaacggattcccccactaacattcaggaaatcatgtcaagcacagagtgcctatgtaagagtggttgtgtctattcactacatttcttggactaataacacacttagccttcctgaattgccaacatgtacaaaaccagattggggttttttagttgttcatggaactatcatttattgggtagctcctgtagaagcaagatacagaaactctaattaggaataagacagtccctgtacttcaaagagctctcaggggaggcacacaagtaaacaagcaattattatcatacgttaggataataccgtcatggtgataaccactgagtgatagccaaacacatggaagaggtacccaagtctaacttggggtagtcagagactgctttcaaggatatccgagtaagtgttagctaagacatgatacgtatttctaggagggaaattttcaaggcaaggtggagattgtgcagtgacgcccagagcctggattattttggtgactgctagtatttcagaatgacttcagcaaaagttgtagagaagatagaagacaacaaagtataagcagaggccagataatgaggacctggaacagtggtttgctggtaaatgtttaacaagaggctcttggcggggagagagagtgtctgatttgcagcatttggcaaattttgttgcacaaatgctccagcatagccaatttcaagctaccagtgtgacgtcattgaatgcagaattggaaagaaacgggcagtagcacagcattgtatagttattttcattacccagatataatagataaaatatccagatggtatttaatagatatggatgcaaaatttaaatatatgtacattcatgtgcttcatgttactgaatgcgcacaacattcattatccattcattcacgtgttaatttaacaaacatttctgagcctctgctctgtgccaaacgcagttctagctgctggaattacagcactgaaaaaaaaaatttgtcctcactgaggtaagacaaacattattatgcccattttacagctgagaaattaagacatatgaggattaagcagtatagttaaaatcacacaattggtacatgaaggaatcaaagaggaaatcagctctcagattttaaatccagggactcgtttctgctataccatactacctacctagttgagctggattttatcatggtttccctatttttatcaccatgtggttggataagtaaaataaatatatgtgacctttcaaataaatttgggtcatttttcttggaagctcatctggtgtgaactttaaaatactgcaattaataatgattataataccctggaactctgtagcaacctcttttgaagaactccaaggagcctctaaatgtatcaaactaagttcttcaagtgaattagttatcatctgagagtaatatagacttttaaaaatgcattaattgtattaaccctttcaggcccatagacttaagtgtttctttctccaaataaaaatagtaatctctgtccattttctttagagaataatgaagtaattttcattgaatatgtagtcaacataattacttcaattcaatcgtgaaggattttaaaaattatttatgtctactaacttaaagacatgcatagatttcaagaacttaaaaatgcatattgcctctttgccctatgcctcataaaacaaaattatgataacgttgtgtgttacagaaaaacgcactgattgtaatgaagggtgcttcaaaggccatgaacttggaaagcaacttatttacagagacccccagcaatagcagctaaaagattgactgactccctttattttcagttatccttcagacacttttgacctcttcctgtgcctttctagtcatgtgcaatcttgtggatatctcttccttcctcttgttattttctatttcctctgtttctatttgtttctaaaaataatcatgtttgaatataggattagcttccttcccatctccccattaccaatctctcactataccgctatgttattaatcttcctgagaaatatatcaggttcattacattagttaccagctcaaaacgtatcagtggctttctagtcctcacaggctcaagttaatctgcatattctgactttcatattctgggttcatgcaaacttttcaactttccctcttatacctacttaggaggaccctcaggttccatcatgctcatgtttcaagccagaagttctcctgcctcttcctctatgtagactccacatagactatgatatcctgcttctcttttaatcctccatcttcagctcacagccacactcctctgtgaacagttaaatgattctcccacctcttacctcctatagcacttatttttcatgcagcatttttgagacttaattaaatctacagttttaaaaaatgtttttctaccacagtctcttattcatactaaaactttcaagtctatccattttgcttatacaaccacaccgttaggtcttttaggtccaagaatacaagagaatggcaaagcacgttgtttacatccacacatactgtgtaaattcaggtaattttttttaatcctatgatcctcaattacctcacctgtaaaataggtactactcatactgcagaactcttgttggaattaaataaatgagtgtattaaaaatgctcaacaagatttggcacaaaatcggtactcagtaaatgctaatcattattccctttctcttcaaagctccacaattctgtattcatatcaccctctttatatcatttgcaaaaatgtatcctattccaactctttccacctagcctcaacatttacaaacactcctggtgggaagggaaagcttttgaggagagcacatctatactcatttacttctcagggatgcaagctgccctgcttactgagggcatatgttcatagtcacaccggagcccactgtccccttatactctcaaatgggcagtagcaaatcatcttgatcggtagtaatgacctgtctctaaattttcacatgcatcagataatttcttttttagtaagtgttatcttacatatatgccaaaatatcaccattatatggaacactagctgaaagaaaaattattcagtagtcttaattttctagctaacataaattctctccattttcatcatccatttagattaaagactttactgttagctgaatattcagagactttattctgatttttaaaatttatgaggttcataatgttaagacttcaagggtgagctgtttgtgtcatttataatgcgtgactagacagtaactagaaaatggattgttgactttacaagatttctccccaccacgtccccccaaacctgtgctgctgtgtatttggcctgaaatctttacttctagtcaatctttggacctaaagcctaccagcttttagcatcctttaagattgacgtgtctctgggagaccaatagatgctaaaccaaatttcgtatgcacttggcaatataggataataacaaccatactccctgcaattgtttcctaacacagatgtaacaaattaccacaagctgggtggcttaatagacatttattctctcacaaatctggaagctaggtgtccaaaatcaaggtcaattatccctctgaaggctctggggaagaattcttccttgcctcttccagcttctggtagccccaggtgttccttgatttcaagcagcacaagttcaacatctgctcctgacctcacataaccctcttctttgtgtgtctttctgtgtccactcttttctttattattattattattattattattattattattatactttaagttttagggtacatgtgcacaatgtgcaggttagttacatatgtatgcatgtgccatgctggtgtgctgcacccattagctcatcatttagcattaggtatatctcctaatgctatccctccccccctccccccaccccacaacagtccccagagtgtgatgttcccattcctgtgtccatgtgttctcattgttcaattcccacctgtgagtgagagtatgcagtgtttggttttttgttcttgcgatagtttactgagaatgatgatttccaatttcatccatgtctctacaaagaacatgaactcatcatttttttatggctgcatagtattccatggtgtatatgtgccacattttcttaatccagtctatcattgttggacatttgggttggttccaagtctttgctattgtgaatagtgccgcaaaaggacaccagtctttggatttagagcccaccctaaattcatggtgatgtcattttgaaattcttaactaattacatcttcaaagaccctatttccaaatctggtgacattcaaggtttcagggacatgtgactattcaggggaaactattcatcccaccacatcccccttgaaaattctggaaaatgtagtaataaaggcttctgataaattagtgtggaaagtattcacggttataaattactaaaaagtctcactgtgagctcttaatcaaaaggccctataaaacatttatttgcttgattaaaactacacatccgatattttggttttggatttattattatttttagacttggaataactattttatgtgaaatagattccataactgaagcagcatacctctcaatttcccaacatttattttattattttttgtcttcacactacttaataactgaggaaaaatcatttagaccaaagttcaccttggttgacaccatccagacagctacaggaaataacaatggaaactaaatctctaagaaaaagagtctttcatgtgaaatattgcagagttgattctagatatatagctgttggaagaatggatactattacatagatatggcagagtggtatccagcacctttcaacaaagatctttcagagtcagtcttattatgtctggagaatttacccagggcttaggtgcttttactgacaatctaaccacctgcaccccacccaccgtctaaagctaaagtttattggaagacttaggaaatcagtcttcggaatgtttctgagactggtacacccaccacttcattaaagtgcttcacttcacttcattagacaagaagtaaaatacttgtcaggaaattatttatagtaccatgtatatgggtatcttatttaatactacttaatgatggtactacaagttatataaaatggagaaataagtcatcaagtttgacaataatgatatttgatattatcattatcttttttattcgttcccacagaagtactctgttattggtttagaaaaatgatatttgatataataaagaaggaaaaggtggtaatattctttattttttgtatctttataccccagctctttcaccaatctcccccatctctgtagttctcctctggtgtccccaggcagtgaactattcccagtggttagggaacatctcattgagtaagttacatcaacatttcttcacatttcaggacaacaggaacagtgccaaatcctagcccattgttcaactctcaagccttattatcctaataacacatccatcccaagaaagaattcatcaagatcagagaggaatacgtataattttttatagtacagtatttaaaatgaaacagcttttggcccgcgtggtctcagtgggctcaagggggaaattcaggatgctagctcatctcacaccaagtttaataaagggtgtcctataaaaagctaatttcttgctggtaaattgctttttaagtaatccttgctgttgcaagagacccattcatagcgctgacactgggagccatgttggaaaggctagatatgctctgggagataaggtaagatccaggtggaatcttctctttacagaatgacaatgtatatagctaatattgtcctttgaggctagtttgcatgcagttgctggtatggcactgctcagcagcctgctgcagataagaatgagtgatgatgccctagattttaatggaacttttagagtgcatgcagcagtggggtgcagtcttcagcaaagaaaaacgagctgacttgcaggcatgagagatcatcaagaaagataaagaaataggacatccactctaggttaggcaaggctttttagaggatattatggaaatgagcaagaaccaatttaatttttataatgccactccatttaactttaaaatacaaggtcaaggtactgtgtttttcataatgattaaagatttggagcactctttctgttgaaacatactgcatctgtttggcagaaaaaaaaagtgacaaagaataaaactgggatcagagaacaacaaaaacatattctgtcacttgcctaacacaagttaaaaagcaaaggaaaaagagacaactctgatggacatgttcatccttatcccaacagaaggatttatttacctaaggtcctattatttcaagttactttgatcccaggatggtaacataaaatgtacattttaaaataaaatggaagtataagatcaataaaaaccacatatctgtggataaaacagcagattcaatcttgtggctgaaagtttgctttaacccaacatttggtaaactattcactctgtaatttattaaaagacatactgttattataaaactatctcagtttgcatcttgttggttctgtcaaaatttcatcctgctaattctcaacttgtaatatctctgatatacatgattaatctattttaggaataaaacaaaaactacctttatcttacgcatttctaggaagtgtttttagatgtaaagtaggggtaattgtagtatagtggaaaggattttgaacttgaagccagaacatatgtctctgccaaaaactaggtgtgtgaccttaaataagttacttagcttcctgaatcttagtttgtttagcttttttctataaagtggcacacctatccacatcacagttttgttgtcaaaattaaataaaatactatattagaaagaaacttttagaaagaaatttataaactgaaatgtactatacaagtttaaatcattctcattattttcttaccctaaaattttgaccttatttttcttagcaaatggctgaatctgtaaaatttaacccccacgcagcatctggattcaagagaactacggtcatttctttatacagaatactaattatacacatatagcaaaacacaagttttttccaactactctgtgtttttaaagattcagtgtgggcagaaggaattttatcaactatgttaggggaaaaaagtctgaagaaatgaaaataatgagaaaaagcactgttgatttaagtgcaggaacataaaacttcaaggcaaatgtgaggccaactgagttcatatatatcctcacaaaatgatttagttaatttaaaaacttttctaataagcaacacaggtaatcccaaattctatcttttatagctctaagagtccccataatttattcagcaattatttaccacccacttattataagaaaagccctgggataagtcttgagaagaaactaacaaaaacaaaacttgattgtttgctctcaaaaagctgggtctaaaataggcaaggtaagattttgttttgaggagcccgtattttccagcactgtccattgtaacattaaaatagtttgccaaaatcctcactctgtgggtgtatttgcctagggtgctaaaattgcttaaaaactttgttatttggctaactaaaatcactgaatagtaaacagtagcattagagatggcagagacattaggtgtcatgcagttcaactgcttcacctagcagacaaagacattaagttccatttcttaaatttaactatctggttgaggatacacagtagcagagctaaatcaagaacctcttggggttagagtttttgtttatgcattactttgttttggaattaaaaacagtgcctgtttgctaagttaaattgaaaatatgctctgaaggagaaaaacagctataaaaatagacttaacttccaaactatggatcacaataaactaaagaaataatttctgtagcaataaactccaacactttccataggaccagaaaggcttgagaaagaggagaacaaaaaaatgctttggggcttaccatatatatggagaaagctaaatgaataaaccagttgaaagacagcgagttatactagtaacaatattactgatatcggagctctcacttataaattgtatattatgatcatagtgactaggtactttatatctgctttctcattccttcctcacattaattcacatgtaggacagattacctcttctgtttctatccagaggcctagagctcaggccctcatcgaagacagacagagctatcatccttattctaaaaaaaaactaagaccccagacatagctgtgctacttatagactagaatgtgagagaaaaagacaagctttcatcatgggcttaacaaactgaaacacttcttcaattttgagattgagaaacttagctaatgctaggtgtaaagatgatatgctaccttcataaccttggtgaggagaaattagcatttctctcagtcctagaaggaggatgaccatgaaggtcttcattctcttgagaagataatcaaatgcttcactgccctgttaacggtttactcaatattcaccaagaaaagtagatgggattatttttgcagacacttatacgggtaatttattctgataagcagagacatacctttagtgcataaattgttccctttgtgctctttgtaataaacatcaccatagagaacaaacacgaagtaatgacattgaattaaaagacaccatagaggcaacagcgactggaatttgtgaaagtaaaaggatagtgcaaacagttgtgcgttgcattctgctctgaagattaacaagctgggtcaggctttgaccatcatgatgagcaggagatttttctaatggaaatccccaatcaagttcctgctgcacccagaaaggaacggcttacagaaatcttacatttctttgcacataccaaattgcttggcatattctatcacaaggtttactttccagggaatgtgatcaagaaatcatgatcctaattcctagttaaccctcaaagtttctcagaacagtcagtgcatcactgtcaacttttgtgcaatgtggaaatcagaattggtcacacgtttttccggccactgttttagattcatataatattagtgaaatcatgtcagactggtatagccatgaatttatacttcatgaataggcactcaataaatagtggattaaatcgaccgatttgatttttacctccaataatttcaaaaatatcattgaagacaaggttgttgaagctgtcacttttcttgctgaacctttgttgtgccaggaggaacagatggtaaaatcaaaagtgattagagaatcagtggggtgggggtgagattggaggggagaggtcttcccagtgagacccgctagcgtcttccctgagcagtatgttaacccaagacaattttagaaatctgtgcccctaagttgcttgacatccaaagcacacttgatgcatcctacatttctaaatatttttattgttgtttctcggtagtaatcatctggtttagtcactctaaaagtcaaggatgaaattttaaaatgcaaataaaagtgcctactttctctctttccaattcctttttgttttattgaggtataatttacatgcacaaaaaaatcgcctttttaaagtgtacagtttgatgagttttgacaaacatatgcagtcctacaaccacgtccgtgatcagaataggaaatatttttatcacttcaaaaagtttccttgtactcccgttgcagtcagtctcctgccccaccccagcccctggaaaccactgataggtaaaagcacttttaatctgaaaggtatttaatgtatggcagtgtcagtggtaataataacaagatttattcattggttcactgtatttttgagcacttatatgtgcccgttgtatgcaacccattatgctcaacccctgccctcctcaccagggataaactagtggcagagatagacaaagaagccgtctctctatcacccctatcttatagaacattcttcaatgttagaaatgcagtataatgtggccattgagaacttgaaatgtgcttagtgggaatgaagaactgaagttttaactttatttaatttcaattaatttaaatttatatagccacatgtggctaatgactatcccactggaaagtacagcttctatacaatatgataatatgatacattataacgcaggagtttaaccaagtgctaaagctttactatcaccagggtcactggtgttatgtgaaaagaaaacttacaatagaaaaataaatcctttaaatagtcacagacctgagaaagtttccttctcaagggaacacacattggctcattcaaaggaggttaaaaactagcatttaaggtaatttcatgaagctttcctttggatttctcatgcttattgtatacataaataggcaattttcgatgggacctaataaatcactgttttttatttgaacattttaacaaaattatcaaacagcattgcatttatgttcaacctatttgttctgagaaagacaacgattaagtagaagtcatcaaagttaccagaacaatttttgttcttatgttttagaaggcattgaaggtgtttaaaatgtacacttatagagtcagagtactatgcaactgtggcccttatagtttatccgtcatgcatctaaagccattgttacatctgtttctaattgtgcatggattgtccaagatacacaattggaaattccattttatttatcaatttgaagaggtttcacccatgtggtcactatgatcactatggagtcacattaaattgagaagtctccagaagttgcagtatttatttaaaattctaactttcttcagaggaacaaattctccatttctggattctgaatcctcattagccataaggttgttgtaagaatttgcagctaataggaacacatcctggggagagaccagttgaaaagtaacttggttctgagtgaaattatacagagacagtttctacttcaggtggtgttgctaatgaagctatcatggtaattttagcccatatgatccctaaacgacttcagaaccacttttcatccactaagaacccacttcaaccactgccacgttcactaccacagtataatatggaacaccctctggaattcagtaagtaacttcttaactcattggctatagagctttgcctttgtaaattctttccttttgcagtaaaagagattgtttcaaagtaatccaattagtccctaggcatgtctagaaaggtagagtcaacaacagtaaggtaatagtccttataagatatgtaagaaattatcagtcatttactttaaaataatttgtacacttttccttttatatggttcttctatgttgaagccagtggtcatccagtgattaagattagccaaactcaaaaggctaaaactaaattcaaatggtattattttgctttaattttatgcaatgctatgtatttaaatttcatgaaagtttcgtatggcattgctatcaatttcagtcaggataaatttcccgtgaaataatccacaattttcaactgtacgttgggtacaggtaaggaaacacccttaagagcttatccagttattagctggtattataaatttcaagtaattcaatgttcaattaataaacagttactttaaatgggaaagtatgagtcaagagttagtacaaaggagaatcttaaaagatgaacatcaaagaatcttactattgatttgttggtgcctttgcttgcacttctccaaattgacttgacgttttaaatttgtactgataatcatcagagtcaaatctgcttttaggcaaaaagtatccgctagttattcccctactatgaaagtgatgagatgaattgatcatgtctccagtgtatggatggatgtctttgaggaagacctactgaccttatgtttatcttctgtcagcatggtgtgactatgtggagagacagtgctatttgctaaatactttgtttttcaaataaaaagatttcacagattatgcattgtagaatttataagtattcttttatgtctttgaatgtgccaatacaatttttatgaagttggaactattttatctattttaatgaaattgtaagccttctgtgaattcttttattaattttattctgaagaaaatctgaccaggttagggaaatcaggtcaggttacgacgtgatcccagtggaaaagctgaactgtggactgtgatttaaaatagggaagaggtactgaagtgttgtttttatttttgtttacaaatcagcctttctaactattatgtactcccatccttctatctttttctccaccagaacgtattaacaggcatgcatataattaatgcttttcttgagataatattaaaattaacttcatctgtcaggccgtctgggctaaaagtacacagtcagatctgggtaacatttgagttgatgtaaatatgcccacacatactgacaatgcttaccatttattgtgtgaatgaaaagcagtgtaaatattgtttgttctactagggaagctccacattttaatcaaactttgaccgtatttctaaaatgccagagcatctggaattgttaaaggaactgatagtttttgtgtttttaactgttaggatacttgaaatccaaagggtaaagaaactcagctgatttatacgtttcttcctctttattttaatgtgataaaatgtagtttttgtcatgggctgacaaacagtggtagactacactaactctgcgtttgctgggtttaatcttaccctctcaaggcatggaatgggagctcacttcagacccagccatgcttcactgtccactgccttctcatggatatagtgtgaacattaattagatgaattccataaagtgctttaagctctttggagaaagatactcgctgcataattattcttaactcccatacgctcttatgatataaaccattctgccaggaaatcctttttagggattatcacttaaaatgaaattttcattattaaaagcaggaagaatatacatctactgacagacgaaaatgtgcttaaggcgactgcttttaaataggcagaaatcctgaactatggagccatccatgcctgaaaatactgagtaataatgaaaactggtagcaaatttggaatattaatcatcacattaagttgcaaagaaaaaaaaatacaagccacatgccctttaaaaatacgtgcacaaatctttattctagaaatatataactttaggcctaaaaaagtacaaaaagtaaattattttatggctctgaaagtatccttaatttactcaggtgacaacaattagtgtttaaagagttagttttcaatcttagctacaagttggaattactctggaagctctaaaaaaacaaaaaacaaaaaaaaatagagatgcctagttcccacctgcagaaattctgatttgatttttctggtgcgagacctgagaataggaatttttttaaagcttccctagtgattctagtgtgccacctaggttgccttaaggtaaacctcatattatgcagaacctagcaatcacctatcctgattttatagacgaagatcataagacccaagagggcaaattgatttattcaagattgaatatacaaatgatagaagattcacataagatgcagtatacagagtggcttgtggattcttgccaatgcaggcagcagaattttctttagggttcacccagttcaggcacctctttgcagcagcacttgactaaggttcttctgattggatcattatatgggcaaaaagaaaaagcttaattgaaaagagctgaacccacattgtggaatggaagatatacagtttacacgttataaatgattaatattcatgaaagcatactgccctttcctcttcccttcccatagatgacatcattgcattggtgtagttaggttggtggtttcttgttgttgatcttggttctgacacagttcatcacttattatcctggcttattatctacttctacattcattgttcactcactcactaattaattcaacatggtttttattgttttggaccggttatatgcctgcaacgctacgtaaggctgaggatattacaatgaacaggaaacaaccctgaagtttaaggtatcaagcctttgagttactgtcttttatcatagctgatataaaattgaagccccactttttttgttttcaattactgaaaattcagtgctaaaaaaatgtggatttttattcaactagataaagtactacaattaggtttccactgaccttggctgtttttgttcccagttgccattacataaatctgtgccactcacaacttaggaagggtgtaacattctctgtaatagtttgcctttcgaatagtgtttggattcattactgtccctcgcagtttggaataatgaccactgaataatcagtgtttggagactaaattagtgctgcaaaattccctcaaattacctactgttcttttccctgtcgatgtatcctcatattcactatgattaccctgagaagaaagatattgttgagaaccactttacctactcgaagttttggtatttcaaagattcatacttatgtcatgttgattacattagcactaatactattggcagaattctaattcacgttattttctttttttccaatttctctccatgcctatgtgttgtcccttcgcagctataaagccatggccgattcatgggtgcttttgttaaggcgttcagcagtcacgtttgtagatttttgaatgggacttagagcccttttttgttctttatgtatttctctatttctcagcaaaggaaatgcagacatgcaagaaatagtgatcaaatgtcctgtgtactattgtgggtgtcattaatggtatagggagaaatagaaaatagttgcaaagatgcatttaacaaataaacgaggtcttgagattcaccatgaatgtggccccttctatgaaaagtagttaacatccaactgcaaagttgtactggatcagtttgactttaacctttagctaatatgaaaatatggaattgtgtggtggtgctcacaaaaaagaaaactcatttttcttaattatcatcaattaacatgtactgactacccatgagggaaagttaatttgctcttgagtggaaccagttatttgccctattatttctcccttgcttattcccctctccctccctcctccctttccattcaacaaagaaaaatagataaagcaatttctgattagccagtgaaagcctctaacataaaatttccaaagatgtgccataaattatccacaaaatgtaaaacttttcaattttggtttgcattttcttttttcttattataaaggtaataagtgctcattatagaatttgaaaaatataggaagttgcacggaagacgaataaaatcagccataatcctacaaacctattgacacttgtacatatgtttgttatctctaatgcattcattatgataatgcatcttttcaaccaatagagtaatcactggtgactttcaaatttgcctactcatttttcactctgtggacttactttactacctcttgccctttttcagtaaatgaataaatatttaagtaagtaaatacaaatgtaataacttatgcgctcaagcacacagatacacacagagagaatttggaacttcggaaatgccatcctctccctagggccgcaagtgagttgataagcacgtaaggaaggataatcaggggagccttctcgtattgcccagatggctcaaaattcgtcatctctaccaaacaactatttggagctttgaagaaatatccatgacccctttgaattcttcagtttctttcgcgttcactttgagaaccaagtgacaagtgaatttcctgacttggtcttttaaacctgttagcgcagttccattgagattttgtgggcacaagattgcaatgaagagatcaacagggagaaattcatttccctatatatgtgcgattaatccggagtgctaagggcagatataaagcaggtgcctactcctgtataacttggaataaaaccatttccaaaggctgatgatcctcaagtcttgttctgcaaatgactgatgtataacttcaggccaatttttctccagttagtctgtgtcactgggagtcccatttctcggggagcagccccatgctttgtcaggtgcggagcccacagaaggttaatgcgaaaagaaggcctcttgccagactgttttccagatgatacgtagggttattagtttgagctccttaagaagatttttctcacctgtcctaccaacttatgtttatttcattggtgttagagggtttcagtggcggaagtaaaatatttagcggggaagggacagcgttcatgggaattttgcctaacttaattttgtatctttagctcattcgtagtcattgtactttgtgttttgtcaactgaattttgtttgcatacaaaggcacaaaatgtttgcttcagacctgtcactcttatttttagcatggttagacaaaaactgagatgctttaattgtctaacttatcccagtttaagtgctgcaaaatctcccaggcaatgtcatgggcaactaagggataaaatcagagatttaaaggtgccaggtttcccacgcttctaacagttggcgttttgggtgtatacaatccctcagctttcttctttagtttatggagtcttgtggagggaatagcaggtttttagctaaaattatcatgctgtcgagttgggtctctagtgcatcctgaagagcttgcattatttacagaggctgggctatcattttaaatcctgatgcttcaatgcccgttatcattcttgacaaactcttccagcccgtggtctgttttcctctgtttgcttccatttactttcctgagcaaccagctgagcaaagatttacataacttttgtttaaacaaaccctgtacagttcactctttcagccagtatgtaaacacttttgagacacagttacatttttctattttagtcccagattctgtttatttgctacattttttgtgcccacatttttgtctttgttaagtctcttacagattcacatgaaaaaccagaaaccgtggctgctcaaaagtcattaataatgagatttttagctactgtttctgcttgtaaattcttcatttcacataatacagtctcaaaaggccacagagaattcagcctcgcttatctctgtgttgcagatgatggcttctagccttacccaatcccagtgcagcttgcttgccatccaggagtcgaatttgtttccatctgacattagcgtattaaaaagattggagatcaacaagcaacaatgttcttgtagaaaggtaatcaaggtttagagcctgtgtgtcatgagactcctagcatttgaaaccgctaaggggttgaccaccattgtcccaagcacctgtttaagattctttcctatgataagggacctaaagtgattagcatactgataagattttcctagaataacctatttatttcagtattattctttcaaatcttaattaccatcttttcctttacccagggtcttctttctacctctacgacacatttaattacctatattccccaacctgtaccatattaaattttgaatggaagttttatagggtaatttattggaaggatggccttgagtgtcattatgttcaatgaatgccctattttgacaaagagatgactaaatgttattgaaatctttttaatccaccacgcttctgcttagatgtaaatgcaaatctgttctttacatttgtgattgaattgaacttgaaaagtaccgccatattgattccttctgcaaataaaatataattacatttccctaaactttctacactctcccaagagattggctggctttgtattgtagatttttggtgatcacagaggacaatgcattatcataagaccaataagatttatttttaccttggtaaagaattttaatttatttctagtttcattttcatttatatccatctcttctcaccctctgctctacaaaagtatatatgactatataaattgaaaaaaatatcaagtgcaaaattacagaaataaataattaggttattttagtggaggaaggtttgttgtgggtggaggaggagaggagtgagccaagaaaaacgagggaccatacgtgatcatatttttgcagctattttaaattgtttgtgtatatactttaaaatattataaaataaaattttaagtgcaatgcatatttggagccaatgatgagggataacttcagaaacgtagcatcatcatctagtgctttcatagtcctttcaacatttccagatagttttaatggcctgctcatggaggcaatgccctaattttaacatatctcttcacaactctgatttcttgcttcctaacattaaatgtcttcaaagcttctttcaccactaattccttatcaagaggataagccagtttattctttaagaaaaactagctacacaaaaccgtaagtcattccaacataaatccttcactatcctctctctatagatttggttttgattcctcctgctgaaattcaaccttctttcttcagctatccacacgtcttaccctctaacttccctcaggagtgtctattagctcccattacagtgaccacagtaatatagtaatcccctgctgttctcactctccacttccttacactgcgttttaagtctcttcatattctttatcaccttgtatcatgcatcggttttcttagttgtttattttatgttgccttcataaattccatgagagctcactgccgtatctttagaacatggaacagtgcttggaacataatgggcattccttaaatagctgtagaataaactttcaaaatcaacaataatgtatttgccaaatccattggcttctctgccattttatcttgttcaataccactgcgatattccccttcctttttttttttttttaaagtctgtaaccctttagcttctgtaatattcctagttttttattcctctcatgtgtcaaaatcatcagttgaggcttattgttttctctttctcactctgacctcacctttgtttacatctcatcttctggctttggctatcctgttttttatctctgttccaacctgtatttctagccctactacctggacatgacatgtggatatctccgtatgaccgcagtttccatatgactttgcaaattcatccctgctctcccctccaaagtcatccccacaattgacttcctgttccttccaacctattaaggttcaaacccacttttgctcctcctttgcaggctacacttttccttctcagtacctcttttttttccaagttcttagataaaagtcatagtaccttacgttgtaattgccactggtctggtctttctgcctgctttcctttccatttgtaatcacattatccattccaatccatttataatactgtgatcagccataaaaataacatttatcatatcgtttgtctccttaaaacctgtagtagatcccctctatttacaagatctggtataaaatcacccttcctgatattcaatgcctgttttaatataatctcaatattatgcgtcataaatccccctgtgttcttgcactttttatttcttatacatctcatcaaccatgtcttatcaactctcaaaacctgtattggttttcaggaaaactcataaattattcttttgtagaccttttgtttgtcatctttgaagatctctctctgaactacaatattttgtctgtataatcaatttggaaattcatcaggtattgaaatatgacatgtcttctattgtcttgaacattaattaaaactttatttgactttttatatgcttacatcttgtttcctcacggagtgttaacctactagaaagtaatagtttaatcttatatttattttaattcagatttagtagcatactttacacgtggtaggatgtgtaactgccttacaccttgcttacgtgagttattaatgttttcgtatatttaatctgaggatgtactagcaatgttaaaactgtaccgcatgaaattgagtaattgaactatttgttttaaatgtgttgcttaacttattgtaccattttctcataatcacagctcaagttaactttgtggttgtacgtattatttcttgtgaaatgccaacaaacttagagcaaggaaaataacaggtataatcatactataaaggcaaccttaacactagcatagtctcttagctcatatggtaactacaataatgtacagtgacaaagagaatattgtactttcttagcacacactttcctactactctactgttgtggataaaaacagacatactttaggagaaactatgttatttccaaataatgccttaaaggttactccaggaaaaggcatttacataaactatctaggaaaagaaccttttaaataatataaagagctcacccaaaaggactgaagtgtttagttgaaaaaaagtaaaaatgtcgaagactttgaaaaatagtttcttgcagtatattttcatcgcttccacttacgttatgaagacattaagcgctagtttatcaaaaactatttttgtacatgtcttctaatgacagaacaatgtcaacatgattttcatcattgagaatgcgtaaagaaaccctttgtacagttttttctatgaatgttcccctaagattaaagcaaatttccaacacgaattaggcactccgaaaggaggaggggagggaggggagcaagtgctgcaaaacttcctgttgggtactatgttcactatctgggtgatggaatcaacagaagcccaaacctcagcatcacgcagtatacccttgtaacaaaccaacacatgtacccctgagtctacattaaaaatagagattaaaaaaaggaaatcagtatataatctaataaatacctctcaagctttctcatttttaaaataaaattttagattattattttaggaataaaataggctcttcattgtatataagttcatttctgagttgcaaaaatcctctctttatgtttttttccccgtattagcatgtttttctcctgtttttccccactcaacttggctgccacaatcagaaagcacaaagacaattttttcttgcgcttgtaaatcaaaaccttagcatcagacaaaataactgctccaggtctgtcaaatagattcatttgagctttcttcatgcattgaatacggcagaatttctgacctgaagaaatctagccttttccaaatttgctttaagaacattttgcaataaatttaatataataaaaggaaaaaacacatcaggctagaatttggaaccgattgttattaaaaatctcaagtctatcaatttaacttcaacaaattacttaatttctgtgatggttaatttcatgtgtcaacttggctgggccgcagggtaccgagacatttggtcaaacattattctgggtgtgtttatgaggctgtttctggagagattcacatttgaatcagtagagggagcaaagccgattgttctcccttgtgtgggtgggtctgatccaatcaattgaggacctaagtccaatcgattgaagacctaatcaaaaagcctgattaaaaggaactcctgcctgatagctaaagctggaacacccatcttttcctgcctttgagcttgaattgaaaccttgggtcttcttgagtcttaagcctccagttctggggctggaacttaacgtcattggctttcttggttctcatgcctttggactcagacaggaactacatcattggctttcctgggtctccagcttgctgactgtaaatcttgggacttctccagattcgtaatgagccaatttattacaataagtctctccctctctggtttcgagagagagagagagagagacagagagagaaatgagagcacaagaacgtgagtgtgagagtgccctaatataatttctctaaatatcactggttactcttcaaagttataaaattggtataaaaggtgacctcaatttttcatggagttaatgtatgaaagtcacaattaaaaaggaagaattagttctggtgtcctgaaagttatttgaataaattaatatgctatggaggctttaaaatactatgaaaatttaatattgtattattcttagtgttgctatttttaaatagcactttttcttttcctttttttttttttttttttttttttttgagatggagtctcactctgttgcccaggctggagtgcagtggcatgatctcggctcactgcaagctccactgcccgggttcacgccattctcctgcctcagcctcccaagtagctgggactacaggcggccgccaccacgtccgggtaattttttgtatttttttagtagagacggagtttcaccgtgttagccaggttgttctcgatctcctgacctcatgatccacccaccttggcctcccaaagtgctgggattacaggcatgagccaccatgcccggcttaaatagcactttttcttgtgagtcactttttaaatatttgtgcaaaccttgttgccattctactcaagctaatatcctaaaccgaggacattataacatttcaggagtcaaaacttcagacacttaacatagtatcctcaggttcatccatgttgtcataaatgacaggattttattcttttatatgactcaataatatcccattgcatatatatgcaatattttctttattcatccattattaaacacttaagttgattctatatcttggctattgtgaataatgctgcaataaacatgggaatgcagatatctctatgacatactgattttatttgctttgtctctgtccccagtagtggaattgctgtatcgtatggtagttctatttttaagttttcgaggaacctccataccgtcctccataatggatgtactcatttacattcccaccaacagtgcataagggttcccttttctccatattcttgccaacactttttatcttttgtattttgataatagccattctaactggaatgagatgatatctcattgtggttttgatttgcattttcctgatagtgatgttgaacattttttcatatgttgtattaactaagccaaacacagaaagacaaatgcagcttgttctcattcatatgcacaatctaaaaacatcgatctcatagaagcagtaaatggacggtggtcaccaaagaatgggggaagtaggggaaaagcgagaatggggagaggattgtcaatgggtacaaagtcacgattagaaaggaagaattagttctggtgtcctgttgcatagtatggagactattgtcaacagtaaggtattgcgtatctcaaaacggctagaagagagggttttgaaggtttctaccccaaataaatggtaaatgtttgaggtgatatgctaattttcttgatttgatcaagtaaaggtcttaattgtttggcaattaagactcatgaatacaaataaaggtcttaattatttggcaaagcatgctgagttttgtaaacaattcagtagtgatttttgagaataggtcaatagcaaatattaattaaaatgtcttctatttatgacctacagctagatggtaaacagatagatgatagatagataactgatagataactaatagatgacagataaatgataaatagataaatatagataatcgagagagaatacctttcccttcacacacgtgcatataggcacactccatttctatcatagttaccaggattcagacattttgtctcactatttttctcaatgtgaacatgcatataggaatattatagtttttgttctgtgcccattttagttcgttttttaatatttcaggacaaaggcaatatggcggtttcactttgtttttcatttttgcttatactttttaaagctcagtgtagaaaagtttgaaaatacacaaaagtattaaattaagacagctgggcacagtggctcacgcctgtaatcccagcacttcgggaggccaaggtgggtggatcacgaggtcaagagatcgacaccatcctggccaacatggtgaatcccgtctctactaaaaatacaaaaattagctgagcatggtggtgtgtgcctgtagtcccagctactcgggaggctgaggcaggagaatcgcttgaacccgggaggcagaggttgcagtgagccgggatcacaccactgtattccagcctggtgacagagcgagactctgtctcagaaaaaaaacaaaacaaacaaacaaaaaagcacctatagtctttctcccataggttgccttcttaatgggttttacaccttttgatgttttcttgagttctgtcccattagcaagtagtattgtacaaaaaaaattttatcatcttttatttaatattttattgatgtttaataattagaattattttaaattttatatgtcattttaaaatgcaatacaatatagtaaactcccagatgtgattgtaaataattaattattctcccattattgggcattgggactgcttccacattttggtcactgcagtgaacatccttgtacatgaatctgtatgttgaagttgatttcattccacactccccttcattcaaggggctccaaccattctcgttttctttcagcttctttatatccaggcatataaagttccttcctgactcgggagcgtcatacatgctgttttctccatctggataagtagttaattctgttcttctttgtgcatctcccgtttcagtaacttcatctccaaagcctttccaggtcactttatctaaagttacaccataatcttgcaaatcctcaactattgagcattattagtctccgttatcattattctccattattctctgtgaaagcatcccgtgattttcttttgtccctattaccacaatatgtgtttattccgtgtatgtacatctttgtttgtttattgtttgtctatacctgcaatgaaatgcctaaggtcaggaactgtctgatgcaggatgcaatgcgctcaataaatatttactgaacaaattaattcatttgctcagtcttgcaggcaaatggtacttctgtatatttaaatatctaaaatgaaagcgttactcgttactgttggttgtcaatcaaaatttaaatgtcgatgtttaagcgtgaaagacctctgtcaagttaatctgtacttacccaaaggctattatgtagaagcgacataaatattttcctaaatgttgattttcatattttaagaagacaatgaatgtttcaaagcattttcttctacacagctatttattctggagagtggggcatatgtttcttaatattgttaaaattggcaaggggatactgttgctatatacaaagaacacctaatcatcatgcagacgttttgtttctggctctcagttatgaaaagcagagattttaaaaagttacctttatatgctaaattaggaatggcagaaggtaatattctaatgtttataagtggttcttctctgagtccttggtttctatgtttatgaattctctttttgaaagaaattatagttattattaccaggtctattcttttacattgtttctaattctatggtgatcttcaaaatagagtatcaattttaaatacttgggaatgaaattattcttcccatatcatttctttgtatggcatacattgtgatttgttgtcccatcattgtttcagtatgacctgttactgcaaaaacatattgagataaatcatcccacatactctcggccaggacagacatcacactgttgcagcaacacttcagatgagccccattcaaccttgtgtttttatagagaaggatgccacatgtttatattcatttctgaagattggctcatattatttattgaaacatactagtttaaaaatctgtccatttatataacacctggtctatctacataacttgaattacataaatataaaactaaacttcccctcttctccagtgtatagcttgcaagcaagtgcatgtgaaataaattaaagccttgtttgtgtttttttcatcatgtgagtacaagacttttcaataaaaatgaattacttttgaacatatttgtttggacaacaaacaagagaaaagatctatttgattgatagtggacagaattttcattaagttcaacagcagaaataccacaattgcatcattcaccttcgtgtatcaaaagaaaacagaaaattagatgtgatgaactctacacaaatgttcactatgcatactttacccattaaatacattatcaagaatcatgtcagcatgacattctaatatagcagctttacaaaaacatgtaatctaatctagggatgctgttgtcctctttaaatcagcttcaaacatattctgggttgatatttctcattcttttttgatccacattgtttattcacataatgattatatttaactgaagataacagcattatcaaagtgaaagacaaaatagatgtttaataggaaagtgagtatcgaatcatcttttttctaccaaaaacatctataattatgaagtatttggttaattattttcacaataatttaaaagtgtacaacttgccgatttttttgtactttctacttttcatgtctcgcatatatctctttaatatctaagtatttgagtcagaaaagagccagtaccgaataatgggaatctcactgaaatgtgataacaatctggggcctggtcctgggacctttatctgcaggacaacttggacaaatatttagacccccaattcctcgtctttaccctaggaataataacacatttttctgacctcatacttcacgtggatctcaaatggaacaatcatctgatagcactttatgaagtatatgaaagcaataaattatcacaataagataattgcaattattctttggcatagtattagtgatgtctttatctgtctgacaaaatcaacatttctgtatggtaactgcctttccttgttttaacagaagatcatgccagaaaagatgagtaggtagatacttaacttgttgttcctgaatctggaatgtattgcagatgtcccagactgatctttgttcttttttttccttacaaatttcttttcacattgacagtgtgatatttctttaaatgtgcaatacatagctaaccttatttgtttgtgtttactaattaaaatatctaaactgcttaaaggagaaaattcagttttaagttttattgatttatacccttcttcaatccacataggattagggtagtatgtaacaaaatttcaaactataaatgaaatattgagttttgtattaaggccaaggatgaggaaaaaaaaagtaagtatatatggaaaaagaatggtattgaatgggagttttgatggagcatgttgacatcatgataatacctattatctttatattctgaatgtcagaacaaaattagagcaattttcccttatttccctacaatacgtctgtcttaataattctaagctttcctgatttcagtagtaatctgtattttgcaaaaggcagcatgtttataagatatcaagtaaactaagtttatggaacttgtaacagcatttttaacaacatttctccctagatagttcatggtagacatgaatttattcaaaactagtatgtagaaaaataccattaacaaaagctctgaaattatattagaggagctgaataatgttacttgagaaagaataaaatgttatttatgatttttggtatcttttacccactatatatggccatatctctgaaaaactttagtaatatgtactaatgcaaatatggtagtaaattatgtctacaggtgctgataccatagtagataaagtatgataactttattttaaaatatcatatttaaataattaatatacagtactgggaaagactattttatctattctctcactcttgaataaaaaaatccagaaaaaaataccttgttttggtaagattatatcaatttatttcccaaatgggtagagggttatttttttctgatcataaacgtatgtctcttcattataaaaatccactaaaagtgatagaagaaaaccaaaagaataaatgtaaacaatgatgccattttccaaaaatcaccttcgacatttttctggatattgatacagtctaaatctcttttcggaagactccctcctgtgtaggttccccaactactctgcaatcttatttcctcttgttctgttcttgtagaaaggagacccattgtcaccatgtcaaataacacaaaatggtgcacgtataagatcattgtctctgtccattatttgccagaggacctcaaactttttcaggtggtgggcaactggatgtcatgctgctccttgtacaacagaacacaattcattatttatatggttatttcattttaagaaaatttaactttcattagctggaaaaaaaaagaagtggtttttaagttgtttagaaatgtgaaattcaattttcatactgcaaaagagattcaactgcaaacacaggcacacatgtctggtgtaagaacgagttgtcatacaaacccaaattagctgcctccacgttgtctttgttaacaagtgtttgtttgctccttgttccatcattcagaaatgctctttagcaggaattgatggaacacagtcgcagtgacctcttcctgtctttaaaaatcgagatgacatttgcccatctgcagtgttaacatagttcctcaaagaccactgacagtggggtaggactgtattgcgcaagttctctcatttccctagaatataattggtccagggccagagattttagctcatttagagcagcaaggtgctcttttaaaattccctcacctattttgggcttcatttcccttatacggttatgccttttccagtctgatgaacattctccttgacagagcagacaagcaaaaggagctgcacactgctgctttctgtgtcgtctctatccctaaccttctcccttctgccccaatcagtgaaccttcgtctttctggttcttcttcctccaaatggaagtaaaaaggccctgaatgttgtctttaccattatcacgagcctcaattcattccaagctcagcttttcctcactgtttatacagttctatattgttcttctaatatttgccctcagttctctgtccctcgtttcttcccatgttcatactctattagaatctgagcacctttgaggttgtccatacagtggcacacatctttgttttatactcactgggatgatttgccattatattgtcaaaattttattctaaagagcttttacaggctttcttgagccattttctcttgaaattcaagatcgttgaatctctacgctttttccttcttaatctaataaacatacacccccacatacacacgtgtgttcctgaaagacagatgccacttgactcgtcttatagattgtctaaattgatcattgtgtgtggggataaaagggtgaattgtataatatccctgatggttcacgaagtctgttcctgtataacctgattagtcttctgaactcttttaaattctgtctgcaaatgactgaggtttggcaatcagcctatttcagttagttgttttcttgcataagaagggtccatatgtactgtgtgaagtaagagagagaaagtacttagatttgctggatgccctgattgttagcatggctaaggtattgtgtaagtaaggagagcagttaaaaatgatattgtttttatttcttaattgaggtaaaattttatataagatgaaacagacttatttgggagaggaggaagagtttgttcttacataacatttcaacctgtcatatttagttgagaacttcaatctgtcaagatactttgtataatattcagattctgccatctaatatattttccacgctttcttactgggtgtgacagtaacttatactgtggcaggtgtataagttagtaaagatattaaatgctcaatctgttaacttttgtgaagtggtcccactgataaagtgacacctcaataaaataaaaatttccattacctcagaaagctttttcatgctaccttccagtcaattcccagccccaataggcacctattcttctgatttatatcaccatagattagttttgtctttttaaaaatttgtataaatgaaatcatacaaaatgtactattttgatcagcatactacttttgagattcatccatgtaagtgtatcagctgttcattcctttattgatgattaatattctattgtatagatataccacaatttatttatctattctccttttgatggacattcaggtggttttcagtttttggctgttatgaataagatgctgtggacatttgtgtacaagccatttgtgagcatatgttttcatttagtttgagtaactctgtagaagtggaatggctgggtgaaatgtttaaatttatgagatattgtcaaacagcacctaaacagttttctaaagtggttgtgccattttgcaatgccaccagtgatgatggagagttccagttactctacatctttgtcaatatttggtcttgtcagtcattttaatttttgctatcttacagaatatgtaggtatattgttgtggttttaacttatattcctctgattactagcactattaagcatcttttcatggatttattggacattcatatagattatgtgtgttgaagattattacctttatgattattgggtgaaaatagtatcattttgaggtcattcatataacttgaagactgggaatgacagacattttcctgttttgtttcttttctttttactttatctgaagagtctactagaatgcagtgttgctgcctgagcagcagggcattagctttgtaaaagctctgttccttggcaaccccaccactaatatgaagtgcagaacatttgaattgtctttgaccagcttcagcatcagcactattttttttttttgctagacccctagtaggtatttaaaagtacagaaatagaatttaatcatgctttttaccaaatgtgctatgctcttagagattctttcaacgtgcataaaaattctgcagtttcaccacataccagtaaaagaaactcagtcactcatttagccatttagtaaaaagaacaaattaactgatgagcatagtggagacctcaaaggtaaagaagacaatgtccctgaaataaagacaatcataaattttcaatcaaaataatgaaatttaggctgggcatggtggctcatgcctatgatcctagcactttggaaggctaaggtgggaggattgtttgaggccaggagttcaagaccagcctcagcaaaaaagtgagaccctgtctccacaaaaaaattttaaaaattatctgggtgtggtggtatgcaccggtggtctcagctactcaagaggctgaggtggaggatcaccagagctcaggggttggagactacagtgagctatgattgtaccactgcactcaaacttgcatgacagaatgagtccttgtctctaataataacaaaatttaatttttatagactgtgaaaaaccattatgtagatacagttcaagtacagtatgattttataggatagataacttttgcttgaaaatgtattcccaatttataggatagataacttttgcttgaaaatgtattcacaatagagttagtatttggggcacacctttatccatttaacaaacatgttttgagcactgccaggtagcaacacgttactaggcactagagtgagaaaagattacagttcctgctctcatggatctcatggtctagtcaactggaatgaaaggattacataagtagaggtaaagacacacatgatggaggatggagaatagtcaaaggtctggagaatgaccaggacgtcactgtgagttgtctaattgcactgaagcatggatgaagaattggaaagtcattgtaagaagcctaaaaaggtatctctcagggatgctatgaggttctgaatgttatgtacgctatttgggcttcaacaggcaggcactgagtattcagtataaatttttgagcagggaatccaccagaagaactatgcatctggaggattaatctggaaagattgtgtagaatgttatgcagtgaaagagtctgagatgaaacagttaggagggtgtattaataacataggtgaagtgtaatgaataaccaggctggaggaaaagcaataacgatggaatcaaccgggcaagaagtataacaattaggatcagtaaaatagaatttggattggaggaatgaaaaaaaaagggacaaaacaaagttgaactgctggtatccatactggaaaatacagatgtcattcaaataaataatgtaatgaatataagaaaccagttttaggagtgaagtggatgttggcttgaaaatatttcctttgaggtttcagtcaaatgaaaaggtcctgaaatgctacgtggtagcctaagaaggaagcgttcctagagagaaaaaaattagaaaagatttacatttgataatttaatcttttccttcatacaagctaaattgataagaaagtaaaacctatagttttcaccactcttttacaaatatccctaaccttttagatattcacatgaataattgagaaaaatctaacagatgacttgcttatgtcatttgtctgctttatccttaggttcctctggcttatatattgttcaataaaatacagatcattgatattgtacaatgtactgataatggggagtgaatccatgcttgtgcattcttttttttttttttttttgatttgcagagggcgtgcccagtcaacaagagaggcacaattgtttttatcatcacctcttctcatctaattccatgaaggagagtagtattaccatacaacagataatgagttggaaaacaagaaacctaacctcagaacttaaggcttggggaaaaataaaagagtaatttgtgtttaatgcctgtataacttggcaagagggacatataaggcttagtgatgcccaacatgtgcttagatgtggattgttagttgatgtcttgggggttctgtaatctaagctaaatgctcaaaatcaattaattgatgttagacacagagatctgctttgatccctctttatcgtatttctaggccttcccattctcaagagcctgagaaacgacagctttccttaataacttgttatttgtggtaggagatgaaactttgataaaaacacaattatttttaaatgtctctttttcactctaggctgttgtatgtatttcaaaaagttacttttgaccctttccagaatgagaaagcaatcaagaagattataatatcttgcttagttttctgctcaatttatcaacaaatatttcttaagcaattattaagctgagcagtgctcagcgctgtacttggtgatataggaaatggggaaaagactgtctttaaggcctttataatagtaattacctcaacttgtctgtttcttttccttaccatttcgccaaattcattgatctatcttgttctcaaagcaatcgccatagttatattgtaacacagcattttctagggtgtccccattaagttgagagtgttgacaagaaaatacaagcttatttatcattgtaaaacttgagacacctagtagttaccctaaattaaatatttgttggagtcagtcacactaaagagaacacttactgcattgaacaatttacctacattagacagcatttaaagactatgccacagcaaaggcccatggaattcttgtgaacacagaatagaagtgtattaaggaacaagcttaattctgttctcttaaagcacaacactttctcaaaacatattttgaaatcacctttgaccattttttttaactaataggtgggtgggagttagggtaggaaaacacaagcagcttcatcaaaacgatattctattttcttcaaatttgtggggaatcatacggcctctcaattttctacattatgctaattatgatattaatctctctgccagcaaatgaaaataatacatattagatgtagcaaatgtcaataatgacaaaattagtcatcatgcagatactcagggattcccaaaatatgtttggattatgattgctagctttgagtttgcccagaatcgtttcaataaaaataagggactcaaacacatttggagcaaaactcacatcataaattttagacatagctctgccaataatgctctcagttatattttcagtcctaatatttcctctgagttccagaccagtatcttcaactgtctgattgatactctctccttcatttctgtctccaatgcattaagtcctgtgtatttactttccaaatgccacttggttccatgcacttctctccatttctgccactgactcctcctcaatccaagcgaccatctttcctcactttaactaccatgatatctcctgcttggtctccttacttctattcccgggctcctccaatccattcatcctccagcagagaatgatgactagcaccttccacagtgtctggctaataggaggtatccaatcaataattgacttacagagtgaaaatataggcatggcaaataccagtagagaactacagggttttagaaccaatgacattagatacttccatcaaatatttacagtgtataatcaagttgacttgcacattgtcttatttttgaaaaacaattttgttggctttttctatatgcacacatacatattgtatcaccctctacccgccaaatggcttttgaagaagtatttatgtggctccaaattgataatacctctagagagaagagaaattagaaattttaaaatgacctatgcttcctttcgaatatcacgtcctgagacagtgttttttgagttacgtgcaatatgttccacgatgaaacatttaatgtgttcagaggcatgctagtaatcatgtagaaagaattttatgcctgaagtcacatgttctataaccaggatcacttaataagaaaacaagtacagctgtggacaagatgcctttttatcagggaaaggccaatttgttttctttgcaaatctaagtaaatggagagaaaaacacagcccttaaatgttttctatttgtcctgaagttctcatgaatgagttagaaggcgagaaggattaaataaatccttgaacgtagagagagctaacatttattttagcaaactaaaacctattcgctttgcaaagttctgttctgtactttgtaacaacagttttctttaaaacaagagccaccaattcaaatgcctttacagaatgattgaatgctttcatgccccacctaaaggcattcaaatcattaatcaaacaaagttctaacgccaaaacatgtctgggaccagatttaaaatgtagccctcagtttcagagggcaaaaacttaacatatttatattttcctcactttaggtaacactgtattgaatctctgcttgaaattgaggagcacgtgattttttctttttggcccagggcagcatttcttggaagagaaagaaaaacaacccaagatacccttacaaaacatgtagtacttaaagctctttatgatgaattaattttggtatacacattaatagcagtgataataacaaatctatatatatatatataattgatatgaataagataaatacatcaaaaggaaatttcattacaatttgatattaggtaaatgtcccattaaaataaattgctactgtacataattttccttcagttcattggcaggatgtttgctttggaaaataaacagtctatttctagttttagaaggaattctcattattcttttatagcaaccattatcaggagcagatgggaaattgtaccaagagcatatctactattatacctcacaggaaaaagagagtattaaatgaaatctaacaaggcctgctcctgactctagttcctgtaacaaatgaacacacacatttgtatggtttcagcatttgtattagtaaggtacaataaatgtttactgaaattgaaaaaaaaaaagataacaggagaaagaagaggctaaaaaggtgcattttatttctgatcgttcattgtaaagactgctcctttttaaaataatcaaattttattttatatacagagggtacatgtacaggcttgtcacaggggaatagcgcatgatgctgaggtttggggtacagatctcatcacccaaacagtgagcatagtacctacctgatgagtagtttttcaaccaatgcgcaccctccctccttcccacatctactagtccgcggtatctgttgttcgcatatttacgtccatatatgctctatgtttagctcccacttataagtgagaacatatagtgtttgtttttcctgttcctgcgttaatttgcttatgattatggcctccaactgcatccgtgcttccgcaaaggacatgatttcattctttttatgactatgtagtatttcatggtgtatatgtaccacattttctttatccaatctaccattgtttcacaactagatggattccatgtctttgctattgtgaatagcacaagacaggacctttttatttgactgagttccttgcaaattactaataaaagatctggaggtccttagttaaaagttgaatctgtagtgccgttcaaatttagagatgtattttctgttcaagagaagaaagccctcattcggtcatgcttaatattcagctgtaaagtccaaaacatatgagaatgacacaaatggaaacattttataaatacctatacaaaggaggggcacttagttcccctaggcctcttaaaagtcctctagaaagagggtacttttatgctaactattaaagatgagtaacgaatttgtcctatacaacttaacagtatcgtcaaggaagtagaaagttactcagttttactgggcattggagctaagcttgaaagtgaggaggagaagcggcaggagacggagccgagaaggcagtggggagaagaggaggatggtcctttccatgctccctgttgtactaacatgtttggatattatcttatacttcatatatggactggattcttgtccttctcattctgagctctccttgaccttgattcttacctcctataactttcattctttctttactcaaaaaaaggccatttatttcagccatttttcactgttttcttatccttcctagttgcttttctatactatttttccactcttttttttttctatactattttgcccttctctccattttcctaactgctagatttccccaattttagccatctttcaattgttctgactatcctcaggtgctcccacaaggttatcagaccttccaccaagacggaatccctcagtctatggacaggctaagttgaatgggtcctggtgctgtgcttagcatatgccttgagtatttgtgcatttattttgcttctttacaaaaatccatcatccgatagaagttgaaagaaacttgctgaagcacattaaaatctctgaaaacagtattggctatattttctaataattagcatgactggttaacttgctttatttatcattgaaaaaagtatcagaaactgtatatcaaactcctgaattcttggcactgacgaagagacacaatgagaatgaccttaggataaaaaaacaagataaagcaccatatttgtaggaaattgcaccataaaagtctgtttcacaactctcccaaatttcattttattacatcttttctcttgaccaatcagtaaactcggttaatgatttacctgtctcaaaataattcatgaacaaaattacaagtaaatctcagtattggattcttgaaacatctccttgttcaatgaagtttcctttttcttccctctatttccctgtatttatcttttcttccagttgcattttatctcttctgtttttttatcttgctccctagtttgtgattttttgccaattttttatttcctacataattcatccaatctgtcattgtacaatttcttataactgcttcttagcttattccttttcttcatttgtcacattctatttttcatctattgtgttttcatgcagttttggaaagttttacaaatagacttttaaaaaaatgtacgtaatgttttcatagaaaaggtagtggtttctttttcttatatccttccctgtataaaaataaaaatgtagcagttctttctttgcctatgtttcctctttccttcccccaatttgaccagacttgaaggacttagatatgtaacagtgttattttctataatttaggaacagcttttgacttaaaaagcagaagagaagttgaaaataatatagtaattctacatgtccttcctgcttcccaactctctgcacatgtttgtaacctcccctttcttttttagtgtatctctttcatatacctttgtccccagaaattctgattcagtagacttagaatggaattctgggcttttatattttgaaaagctccccacgggagttagatatgcacttcttattaagaatgaatgcttaatattggaatcaaaacacaataagctttctaactatgatgaataatccaacagatttaattatgattttctttttgtccagaaccaagactagatgttaattgccagagaaatagataagaatgcctatgacagcagtacattaatatgatatcaaagcttggaaattttattggtaatgaataattcagtacttaaaatatttagaagctatagaattaaaattaattaatgttgttcactgtgtgaataaagttgattgagattttacatttaattttgtaaacccagtgttatcttttccagctcagaaaacaccacatacaagctactactttctgttttgatcccttatttttctttcttatgctttatcactgaaaactctccttgagcaggccatgcactgtaaatatttctcctggttgcaaaaccttctcatacaaatgcagtagactgtgtaatgagctcttctttcacaaaattaaaaaaacctgaaagccctgatttgcgattctatacaaatgagatttagatctaacaattttaaattattgcttcactcttagctgttcaattctatctcttatttgggaaaccgaaataataaaaccattgctgattccacaattaggttgtaaaagtcaccgtagccatcagccatgaagcaaaagtgccaagatcaaaactacaaagcaaagaggctgagataaaaatgctgcagcattagtttatagcattataagcagcaataagaattccttgattgcttaacaaagactcaaaaggcatttactccattaccttacaactcaaagaggtattcctggaccagcagtattggcatttttttgaagtttgtaggaaatgcagaattttggtgcctccacggacctaatgcagcagaacttgcagtttagtaagatctccaggagatttgtatgcgcattaaagtctaggaagcaccgctatggtatacatctgatgtgtgcccatgcattttttaaaagtatgaagtaatagttgtaagtattggacactcttgaaggaacaaataagagccatggtctttactctctaaatacctccctgacatctatgttttaggcaaaatttttttcccatttcagtagtcactgatgcttgcacgatgcagtttattccaaaacaatggtgattctcatgtaatagttcatgttgccttaataatttacgttgcctcaagttctctgcccaggccccaatatacaccgagggctgtactcctcccctaacgcctgctctcatacagtggcatagagcccagttttatgctcttggtcacatcatggagattgcacaccacaggctttaacttctgccgtactctcactgcctctaaccctccatatgcctaagttctacgattctttaaattccaaattgacccagaagtctcctccgctcatccttttcactgagatcatccctcttctggcctaccatttgttgatcaccttgctttttttttatcctactgtatgtagtataacaaattatcacttgcaactgtgtcttattttttcaactagattatgtactgcctaagacctagaaaattgtgcttatttatttgaatctctaggaggatcagtaatgggtattaatactaatgactccatggtgatgatgagcctgaacttcctcccttcctttctttctacctctctcctttcctcccttcttttcttcctccattccttcctctcttcctccctccgcttcttccccacttcccttattcatagattcatgcgttcactcagcaaatgcttactgaaaccttccatgcatcagacattgtactaaacaataggaaactatcatgaataagacacaatatctgacctcaaagaatttatgatataaaagtaatggcataaaccgtgattacttttgcaccaacctaatatatagacacagtttgttatgactggtgtctctattactaagcaatgactgtcacatgcaacgctgatctgaacaggtggtaaagagtgagatgtaagcaatggagcaaagccaactagttacaaggaaatatcacatgtttactagagcacatctcatgggcattcaagagagtatggccaggacagcttgtgaatagttcagtaactgtgcatagttttatattcattgtgaggcaccgtgtcaccggtttgctgatttacagagtattttaattgctaactgtatgctaccaaaatttccagtattcgaaaataattttgcttgaatgtagaaaaagaaaaaagccaagaaatgtatgtgaaacgagagtctaagggagctttacctcagtctcagaaaacatgcattccttccttcatttaggaagcatgtactggggtctactgtcagcttgctattgtgtcaaggagtaggagaatacaaaaatattagagaatatgaatcacatctattaggagagttttctacatacgcacattattctgtcagtgacataaggatttgagtcattcagatttaaatacggtaggtacctcaagttctcagatattatttcattttctaaggttcgtatttagttaatatgttattttaatggccttacaaattctagattatcttttttaaaaagttaaatagaacgtaattgccatttttatttaatggtaaaaagcatttttgtttttgtgtgtacttggttgtaatattctccttttcaattgagctatttttctgatactttactcttaaaatttcattcaggaaaaaagtaaacaatatttaagcttgacaatcataaaaatgctctggtgactatagattattttaaaatttattactgtagcttagggatatcttgatgggatgctcctgaaagcaattaattctcagttttttgtggcttctaatgcaaaatacattgacgcagacagaatttgaaatgaattttcttctaatatagcaattaattttatttaaatatctctagagtttttttttaatactgtgactaacctatgtttgttctttttcacctctcgtatccacgatcactaagaaacccaaatactttgttcatgtttaaattttacaacatttcatagactattaaacatggaacatccttgtggggacaagaaatcgaatttgctcttgaaaaggtttccaactaattgatttgtaggacattataacatcctctagctgacaagcttacaaaaataaaaactggagctaaccgagagggtgcttttttccctgacacataaaaggtgtctttctgtcttgtatcctttggatatgggcatgtcagtttcatagggaaattttcacatggagcttttgtatttctttctttgccagtacaactgcatgtggtagcacactgtttaatcttttctcaaataaaaagacatggggcttcatttttgttttgcctttttggtatcttacaggaactccaggatggcattgggcagcggcaaactgttgtcagaacattgaatgcaactggggaagaaataattcagcaatcctcaaaaacagatgccagtattctacaggaaaaattgggaagcctgaatctgcggtggcaggaggtctgcaaacagctgtcagacagaaaaaagaggtagggcgacagatctaataggaatgaaaacattttagcagactttttaagctttctttagaagaatatttcatgagagattataagcagggtgaaaggcactaacattaaagaacctatcaaccattaatcaacagcagtaaagaaattttttatttctttttttcatatactaaaatatatacttgtggctagttagtggttttctgctattttaaacttgaagtttgctttaaaaatcacccatgattgcttaaaggtgaatatcttcaatatattttaacttcaacaagctgaatctcagttgtttttcaagaagattttagaaagcaattataaatgattgttttgtaggaaagacagatctttgcttagttttaaaaatagctatgaatatgactatgaagctaaaaaaagtgatagtgtcacttacctctagtttcaccacatttgtgaatacattcttgaaggggaacttgagccaaagaggtacaagtttaatggggaaaacaaaacctcaaaaaggttactgtcaaattcaatcatcatttaaatttcccttggaatgtattgaaggcacagaaagccaaatgcgtgctgctgcagttggaaagcctagagagtttataaatgggattttgtattatgcttccagttgttgatgttaatgtgtcttgtttcgtaaaggaagacttggcctttatttaccaaatgagactattgttatgaacaatgaaaacttcgttcttttgccaagctcttgcatcccacccatcatccacataataggtggattttaatattcaggaagctagaacaactcattgatgaatatctttcgttaagatgtattaaaaagaagattttggaattatgtcagttgtctttgcccacctcctctttccctctttattcatgttacattattcagaaagtagatacaattcatattttgtacaaaataaacacattagttgacctaaacacacacacacacacacacacacacacacacacacacacacacacacacacacacaccccttgccaaagttaaagaattatagcctcatcaaaagatattttgaataattaagtcttggttttgaaaatcttcttgattatagatagataaaataaagaactaaactttgtagttaaactacttccttaggtaagtcatatacttttttcccagattgaaattcttctcttaatcatacaagtattttattatttagataactgatgtgcttatactatgaacaggtataaacctgtataatgtcatttctgaactaggctcaatctaatccaaattaagatggtaagaaatgagaaaattaaaaaaattgaataccatactataaatatatatatacggagagaattcataaagtggattaaatcgactggaagattatttttctataatatataaagtattgtttcctattttaaatgtcttactcatatagtatttgaatagagtgtattaacattccctctgataactctaattcacctgaattttcaaaatcttgttatctgttattgggctctaaaggcacattataatttataaacaaagatgtagcaatatgcctgtttcaccaaataagctctaaaattttagatctttctaattttataagaaagtggtatatgctgactctgttgtgaaatagtatacaaattttaagttaattacagctagggatttggctgtaattaggaaaaaaattttcccatttaaacatgttgacctacattaaatattgcacttcagtgctttaaaaagtcaagttcagcttccttgagttttttttttaagctgagcttttaaagttgtctatttcacgctacattttaaaaataaatgttaacatatttaaatttccactgagaccacttttgtggcatacttcctcaggatttttatatcacttaaattttatgaaatgtaaaaatgtaataaaatataagtactggttctaccaatatactcatagctatttctaagcatccagtagcaaatcaagtaaaaattaataaaataatattttatgaataatatgttaacctaacaattaattatagaagggctgtaatcacgaacctattgctaatcaatagtgtactctcagtgcaacgcaagcagatgttagaagggaatagaagttatttattgcaccggtgaaaaatatataagatgcctattcaacttaacaacagtagtcttcgtttgtaatggactttaagtacagcggttagaaatatttaacattttttagtccagggacatcaatgaaagaaagtgtataaattcaagctagatgtctatatggagccctgtagttgcaaaactttaagtcttctgaaattttaagatattagaaataggaaaaaaaatctcaaaagttcaaataatagtggacatccaagaaggttagtctatgttggaagcaaatgaagtgtgaaatgtagtcagttagcgatgcagtttaagatagacaattcactacagcttcaattatgtaacagaagaactggatacatctataggcttaagcatgataataatgagtttaatgatggcgtagccaccaaaactgtctttgtacacgaaggaggtgcaaataaaaacctatcatcggctgtaaggggaagtcataggttgatacaaagcaagcctgtgtacaagtctttaagcaagcgtccatgaatagcaaggggcgccatgctcttcactggagaagaaaattacctatttgtctttactaacctctaactgaaattaagcattccttttcattttgaaagtaggcaaaaaaatcacagtagtacaatcagtacctatgaagtcacagatatgtacacatctcattacagttataataaatatatcaaaatatcatttatgcttatcactacttcaaaactgcagtacttattatatgtgctacagggtcttattgttgggctttaaaacattattctgaggaatgtcaggcttcaacagattgccaaagaagtccaaggcataaaaaaatgatcctagccagctgtctgtttatctgcccagaatctcatcctaatttactatggtttcagtcattttaatgtgcagtcactatcttcatacactccttttcttctggagtattctaggagaagacataccagtcgaggggttctggggagccaggccttcaagcaatggattgctgacaacataatgaagaggattttacttagaataatgtcagttgataaaagtttgaatgggagacggaagcaaggcagtgggaagtggaattcctaaattgaggaacctctgaatcataatccttagcaataataattaagatttcaaaacattataattctttcttcttttagacaagtctgatattgcttatcccatatcacagataaggcaattattctactaatatgcattaaggaatagtggttttaatttaagtgttaccttaatgaaaataattttgaattttttccttccccaagtctttttgtgaaaaatttcaaacatatagaaaaattgaaacaattgcaaaacatatgcccatttacactgttttcctccccctaaattcttagagtcaacaattgttaacattttgccatatatgctttttttctctcgctttctctaccctctttctgtatctctcatatatagggcatcacacacacacacacacacacacacacacactttttaacatttttgcaaataagttataaataccattatattttacccctaaataattcagcatgtgtcgctttgaaatacagacatgccatatataaccatgcctgtttattatgctctcctccaaattaaatataatactgcattattgttaatatccattccatattcatatttccttaatagttcaaaaatgtcttttatattttgcaggggagttagtaccaatatcttatcatggctcatgcattacatttggttattattatttttcatccttcttagtctaaaatagcccttccacatttttttcaccgatattgaaatttgaaaatgtccaggacgctagcctcaaaaaatgtctcatctttcaggatttgttttattttttttcccctgatgggatgatttaacttgttctgtagtctctgaatttctagtaaactggaagttaggtctaaataagacttcaagagatgcatgtcaaacatgtttggcgagaatacttcatatgagatgctgtgtattttgtattacgtcacatcaggaggtgcatcatatgaagtagtctcactaaatgctgcaaagttttattacttgcttcaggtggtgactgacagatcttgcattataatgtcacattttttcttcgcaattaataaatcatctaatggctttagtatccattgatgatccttccctaactcagttattacactggggcttgcaaaatggaggttttcctaatctgacatgatcttaacatttaccagctggctttcttctgtttgaaaaaaaaaaaaaaaaaaggtttttcctctatatttatgtcaaaatggactcataaatttttatttattcaatatattattatgaattacagttattattcttgcccagagcttcctgctcaattgtcccaggctcaccttggactttgcctatcccagatttagaattacccatttttttcaaggaactctggttacttttagaggtgaatagtacgtagaaacgtacatctgggtagtagccccttctcaatggaatgtgtgcacctttctggcaagcagtcccaaaggagataatattttcagattaccttggaaatgattcttgacaaatctctttcagaatacatggaagttaaaagtaagtctagacatgttaaaaagcccttcttgtgtgagacttcatgtacggtcattaagttactactcctttaaacctctctacttctgaattcttaaaccaaaatgtactagtatataatctatgctggtttgccatgcaaattaatggtgtaaataagataatgggaggcattcgtaaatgtacttaaaggaagaaattattgtttaaagaccttagctcattgtttgcatgcaaatacacgctgttgattagaaatgagccttatctaattcattaaagtaggcctggttggtcctcttcttgaaagtctccattagcaattcatattgctctatgcgcttccttgtaagacaactgttgtctcttaagttttctttaactttggcttcttacaaattcagaccccacccccaaccaaatagctttcaaccaaatagcttttcagcatcttatttcctacaaattaaaagcgaatattttaatgactcaaatggctctttacagtgtgtgcaatatgttaaatgtacccagtatatccgtgtgaaccagtgctacaagcctgctcacacattcacattttgcccccaggatctgtcccgtccgcttgctctgtactcaaacttcctttttttctcattgccagtttagaccttgactctccatccagcccagagtttggaaactgagtacccacaggctgaatcctgaatgcatgcagtatttttgcatagccactgtttttaaataattgacaacttttaaaaattgagagacctcattttttaaaaaaatatggatttctgtcttcttttgaaaatttagatctggctactaggcactcattactatattttctcttggcaccatcacctacaactgagtaacagatgtttcattttcttgctactcaaagtgtggtctctggtccagagcacagacatcacctgggagttgctaagaaatgcagaatctaataaataacagtcagcatttttaataagatttccaagtttccaagtgattcatgggcacattaaagtttgagaagcattgcctggggtaagcaagctttgtcctcagtttgcagcacctgtcccactttgctcatttatattaattgcttttccatagatatttgattttatagtacctcatgcagacctttgtatgatgatgacggttagggtggtgatggaagtgatggtgataacacttaatattgccatgcactgttccaagtgttttacgtagctcaatacttataacaactctatgaaatagttgctattctccttttaattttacaggagggcaacgaaggcacagactgataaaactctttgcccaagattgcacagccagcaagtatttgaaccaggatgcagtcccgcagtctgcctccggagtccttactctagatcagattttgcattatttatcccagttttgtccatcaggattctctggtatacacttgcaatttcttcctaccaaccttctccttacctttgatggccacacgtagtagcaaaagaattgaacatagaatctgttctgacctatctttccaaccctgtttttcataatttccactatttctgtttatgtctgaagctttgaatgacctgaagttttctgttcttcagcttttgcaaaaaaaaaaaaacaaagaacaaaaaacaagacaaaaaaaaaaaaaaaccgcttcctttggttgaattctctttccccttattttttttcccaaaatcttacacatcccttaagactcatcttaactgctattacctcaatgaattgtgacctgctcttctcaaacataagcagtttattctcttaaggttttcttgcccctttttataacactcatgtaatattgtatgtatatatcatgtatcatacctatttacatatgcttttcccccagcaagattaaaagcttcatgagggcagaggactctcttattgttatctctataacccacagtacttaccagaaagcctgatatattgtagatggccagtaagtactttcttaatttaaatcgtaagaattttattcacattcagattaaactgaagatttaaatctttacacttgacattattatatagattaaaaatagatctaaagagccagaccaatttttctgtttttatcatgttatcacatttccatggatacgtttgcaattctagaaattgaccttgatcccttctagtcttaaaaaaatggaaggagtttggttaataatattttaggtattcttcagaatttagtacatttaagagacaagtaacttcaatttatttagctagttatggcaaaaagcagctctttgattcaaacattttgtacatttgtttatcctactctcactgtatctcaactaataccttttaagtgaattaagcaggaattagccctgaaactgaatgttttagcctcatcctacatatagccacaagatgttttagatgcaatccatatcaccaaagagctatttttagattgatcagagagaatcatacagatattattattcacaggtgtcaatggaaaagctggtctcttcccatctgttctctgatgactcttgaaaagctttcaagggcattcataattcttcatcaaaagactatgaaaaatcagcttcatagttaattgttttatgtcatattttattttttcaacttggctagttctagtgaaacagactagctggcaccaaatatgttgttgcattggctggtaatgatgataccactgtgtggagatatacaagtgaatgtactttatttgtggccttccatgaactttatgtgcctgggaaagtaggagttagggagagtttgttagggaacgtgatctctgggatgggtcttaaaggatgagaagaggcaaatgaagagtaaatggacatgccagagagaaaaagtgacaggagcaaaatcactgaagcaagaaaaaatggcctacattgaaggactatacacagttcagtataaaaaggctctgttaagcaagcaccattgacttaccctaaactcttcattttctacatataaactgcccaattcccactccaaacctattgatggatattagtaacctattgatgtttttgaaaggtgttcaagtatcctttctggtaccatgtaccttggctcccaccatttgagagtatgttctccaagaggcaacagtctgtggttcctgacctggctatgcaagttattcttattattaaaattgtcctatttaattaaatatcatgaaaactaatgaaatagaaatgaaaagataagagaattgtggtttctatgaatactaaattgaatgctttggaagacttgataaaggtgattagaaaaaaaaaaaaggccagatgcggtggctcacacctataatcccagcactttgggaggccgagatgggtggatcacctgaggtcaggatttcgagaccagcctggccaacatggcgaaaccacatcgctactaagaaaatacaaaacttagccagacgtgggcctgtagtcccagctacatgggagtctgaggtgggagagttgctcgaacccgggaggcggaggttgcagtgagacaagatcatgccattgcactccagcctgggtgacagagtgaggaaaaaaaaaaaaaaaaaaaaaaccacggtgctgttgaattagatgtaggtaagacaactgtttaagattgggtatgagggatagaatccccaaaaaatggaggtattttgcattgagattattttcagcatctccaaatctgactgtaattcaaagaaaccaaactaaaagtcacagattatgaaatgtagaagtgttttatgcaaaaagtaatatgcttaacttcaacctgtgggcttttactccaggaaaagtctcggaccccataccaaatgagaagtaaatgagtgaccacttgtatattctaagaaaaataaaatgtttgaagatgtgtaaacacatttatataatccctccaattttacaatatttttccaaaaaccgcctatccacttaccctaatcaagtttgataaggggacttccttttatatgtaggaaggctgaaaaatgacgccatgacaaatgaaattgtcaagatggaccaggtcatggaagatttgaaatctcaaagaattttttccagggtagaatataaggatgttgggacgtttttatatgctttagatttgcatcctcatatgtccctttgacagttgagctcagagtgaaaaaaagagagtgaaactagtggcagggtgactcaagttagagacaatgagtaagcagaatagaactttaaaaacctgacagattcaagaaatacttgatgaaagtggaacaatttagtcgttaagtagatgggatgatgaggggaatgaagggacaattctaggatgatcccttttccaggttttttgcttgggggaactggctgcatggaaggctgttagtcaggataggaaatacaaaggagagtaactgaatggaaagaggaaagcaaatcagacatacagagctcaacttgggatataatagtcttaaggagctcttggaacattgaaaataaggtgatcagaaaacacgcatttgaataggtaagtctgaacatcaggaggaagacaagggctgaagacactgagccattttgctgtcaatgtagagatggtggcaatctccattgaactaactgcttctcaataaggtacctttctcaagtcattaatttgctaaccagtaaacaaaccagaattcccagagtacacattaaccattaagcactgctgtggaaaaggagttcaggtgtcaggaagccaacgtggcagatgagcactagtggtgacaaatgaaccaaagtgatatgggtgatctttatggggccacagagtaccactgtaaactatcacaaatcagaagggttgacaaacaaaatattggggataaatcagggaaaacctaccacaacatacaggaaaataagttcaaagatttcatcctacagattgcagataagaaatgagccctttttatttggggcaccctagggaaagagtagatgcccatatgtatatttaaagtatgaatacagcatttatttgaatatactgcaaatggtcaatacaagggtagctacagagcccataacatgaaaaggaaacacaaagaaatacatgccccagtcagactccttacttgggttgctgtaaattctctctccctttaaggttattgcatttaaagtctatctgttgattggacccaacagcagctgcaccaagactgtaccatttttaaaaaaaaaaaaaaaaaaaaaaaacaggccaaatggcattctgcatttattttccttgttgctgaagaaacttgaattgtctaccctcaaagcctgtcctttgagacacattttataattagaaacacttatttacaaagttctttttatgttagaatcacaaatcataacactccaaaaaaggaatacactatcctcaggtgagtgtcctacctttgtttacaaaagaaaacccaaagtcctaagagaaaaatgtgttgatcattttattgattccttaccttggtttaatatagttaatggatgtcttagatatgtataataagtctattatcatgttccctttaaaattctcttttgttttactaattatatgttgtcatagtttgaccattaatataagtctaaatttattataatgtgattttttctacaaaggttaatttgaattaaaatattttattttatctctctctactatgataaatgtttttaaaaatcgtttgtaaaatgaaagtactatatttgtgtaagctgccaatctaacaatttatcatttaccattatgatggtgaatgtataacaatccttatattcagcagaaagccttatctctcatttcagaggaatcttgccccggttaattattctgtctcttgaatgcacacaaacacaagcatatctttaccctttttctgctgcctcactatccctgatcaggtgaatgtttttagctcctagattacaatataaatatattcagacattcctttccaaatgcattcattccactgtacttgtcagagttcatagctgtgaataacagaacccagtttttgttgatagaagcggaaacggactttaggagaaagatacagacctgttcccattcctaaacaaagggatagaaaaccagctcaaaatgggcagaactcaaaaaagaggctcagctccaagaactatagtccaaatcataccctagattggatctcgaactcttggactcaagcgatccactcatcttagcctcccacagtgctgggattacaggcatgtgccacgacgtctggcccccatacactagatgtaaacgttgccatgcaccactctaccactgcagacactgggtgaagaatgtcattgctactggaaagaattctagatagtgccttataattctgtcactcattccagattcaaaaactgaacttcccccatcagattccatttgtatttggggattttgttcgacataatcagggcattcagattctgggcaaccaaagttaacaaatgtctcttacttcccctttcttgttattattcccatttgaatcttcttcatagttagtcactgttacttaaacacacattctctattatcacatttccctctcctctcttttgctgtttgcttttgatccaaaccactgctcagaaaccattattgccaataacaacaatgatttcttgtagttaaatccactggacatatcttagtcctattatccgtaggccatgtgccattaactgaacactttccgtattagcacttggtcctatcttatcttccaagtcactaatcttatctgaatttattcttacctctctatgtaattccttactatattgatgacactccttgctttacctgccccttacatcctgatgtttctctaggacatgttctgaaccctcccttcttctcattctatacggtttccctgattgttatccatagcaacaaatgtagctttcactgtatcaattagaataatatctagggagattaaaaaagaattatagtaactgaaacaaagtagaaatatattcatcttcttgtagaaggaatctgccagtaggtagtccgaggttggtatcattgctctatgatgttgaagatccagatcccttctgtctcacagatctgccatcctttggtgaggtccttacactcatggatcaagatgactatcagctctctatctatcacaactgcttttcaaaggctgcaaggtgtaggaagtggacaaaaaagggatacctctacccttttaaagggacttcatggaagatctacacaacactttagcttgtatgtcattggccagaatttattctcatgacaatgccaaactgcaatgggcattcaaaatgtagtggaatggatcatgggctaagcagctaagcagtctctaccaaagtcaccgatttcattttatggcctaagtctaatatttggcccaatatatagtttcagattagacctacatatgtagcttcaaatggaccatttcctcttctatgtctcaaagccatctcaaagtcagtatatccaaaactcaacatgttatattcctctcccaaaatctactgtgggtgatatcactatctattcatgtacccaaactataaatttggaagttacaagagctagtattaatgacactaagttttgtgcatttactctatgaacaggactttgataagagttttacaaatgtttcccacttaattgtcgcaatatctcagttatagagattttatacgtccatcatctcacctgactcttcgagatcataagcaaagcatggcagcattcttatgtccattttacaaattaccacattaagcacaagaaaaaacaagatatatgtccaaggctaaccaaagttatagaaggatcgagaactaaaagtcagtgatttagacccagatctgtgccttttcccttattgttacatatgaccatatctagctatgtgaacaaagcagctaatagtgacgacagggtagaacaaataagaaagtgaatattccccactacatttatgattatttgccagtttaacagcttcaagcctgtgtcttctcagatatgtgcttcctcttatgtctaaggaaaagtactatatttgatatgcttttatgaactttcttttttgagatggggttctggctctgtcactcaggctggaatgcagtggcatgatcacagttcactgcagccttgatctcccaggttcaagcgatcctccaacctcagcctcctgagtagctgggaccacagacacgggctactacacccagctatttcttttttttttttttttttttggtagaggcaggatttcactgtgttgcccacctggtctcaaactcctgaggtcaagtgatccacccacctcagcctcccaaagtgcggggattacaggcatgagccaatgtgattggcctgaattttttaaatttaattttattgaggtaaaatatacctctatataaataaaagtaaatatacctttaccatttttaagtatacagttcagtggtaataagtaaatttatgttatttttcccctttgtcccctctccctactcctatttctgatctctggtaaccaccaaggtagtgtctactttcatgagatccatgtttttagctcccacatgtgagtgacaacacataatatttgtctttctgtgcctggtttaccttacttaaaataattacctccagttctatccacgttgctgcaaatgacaggatttcaccctttgtatggctgaataatatcccatggtgcatatatatatatcacattttctttatccattcatcctataaattttaaatggtgtggaatttggagaatacttaaggaaaaatgacgattgtgtaaaaggaaagtatctacaaaagcaaggtttatctaccccataaagataacaagagaatctgtgaatgtggatacggtttctggagtgtttcagaggttgaaagattgtgaagaactggatgggtataaaaaaaagtgaggaggagaagaaatgaaagttctggaatgttctgtaaattgtagatgagttccctatattaattttaaaatgtaaattgagattataattattttttgatgatctatttttgctgggctgattctctgttggtgtaactctttaacgaatatgggtcacgtgggaccctggattttattagaattacatgtgcgaatcaaattctaactttatgagccaatataatgattgtttttttaatgattagagtctatccatgacaaaaacagcttgtttctcctactgacttatttggtgttttcttgctaattagcctttatactaggcagtagtaaatcagagtacttggacttcaggttggccattacataaacctggcaactaaatgctgggtaataatcacctatcttcccacctgtgtttattacctttggaagtatgtaacatggtatctttgcgtttatatttttaatttgttcttttttctcttgcaccagctacttaaattatctgagcttccttttactaatccaaaaataaagataatagtacatatttatagagatgttgtaagagtaagaggtaatgtaaataaattggctagctctatgcccagcacatgagtaggtgcttagaagttagtgtctgggtacatgacttctggggatgataaagtgagtagctcgataaatctccccaagaatcagtaaaatgggacacactggagaaaacatcttatgaccctggatatcaaccaacggcatatgctaaattaaaaagtgattatttataaaaagtactaaactttgtatatgaacaatatgaatttgtggtgtatttgcctgtattgcccccagtccccactcccagcttggtcaagcataatagttctatcaaggtagaacaagccatggaaataagcagcttcatcaccacagggactgattttatttgaagcagaagtttaaaactccatgtccagaagcattgtcagtaacggtggagacctaggcggcaaacaaaaaggcagaatagcaactcagctggcctaaagttgcagtcttgattggaacaagtaactgactggcagactggccagaaatttaatttaaccagcatatctgcaaaatgaggcagccgtaataggcctcagtaaggactccttgtgtctccttcatgaaaacttaaaatgtgcctgcatgttgaatataccctttaacacatataaagaacctttagcaaaacttggaagtcttactggcttgaggtatttaagatcaactgctggccaactattgactaatgcaaattaagctatgcttacctctaggaaactaggcatacagtttgtttctgttgtttgacagagaaagaatatcaacagccacacactgtggggaaacagattccacagatttcatctaggcaagttattaaaacttcaatttaaaaaacgctgggcataagaaggaacatcagaatttggggctcctttaatatgttatttaaaatgtcaaattttcaagaaaaatttacgatacgttcaactgtgacccattctcatggggaaaagcagtcaacaaaagttgtctctgaattggcccaggtattggcagatagagacttaaaggctcctactataaataccttcaaacaactgaagaaaagcatgtttaaataattaaatgaaagtatggtaacaataactacaaatagagaatctcaactaaaagatacacactatataaaagaaccaaatgaaaattctagaattggaaagtagaataaccaaaatttaaaaaaatcactaatggggctcaagagcagatagtaagacagaaaaaaaaaaaaatcagtaaatttgaaaatagataaataaaaattatccaatctgaatgtcagaggtaaaacagtataaaaaacgaacatgagtcatagctttgtgtcaaaacattgagcatatcaatgtagatgttacaagagttccagaaaaaaagagaatgttgttaaagaggcagaaaaattatttgaagaaataatggccaaacacttcacaaatacggttaagctcaacaaaccccaaatagaataaacacgaagagatcaataccctaaaacataagagtcaaactattgaaatagtttcatttgaaattattgaaagacaaatgggaaagtctttaaaacaaccagaaaaaaatgactcctcatgtacagggatcacatgattgatagttaatttctcatcataaacaatagaggccagaggtattgaaatgacatattcagagttctcagagaacacaaaattgccaaccaagaattccgcataaaacaaaactatccttcaaaaatataggtaaaataaatatattaccaagttgagaatgagaatatttcttgctagctgacctgacttacaagaaaaaactaaataaagtcattcaggctgaaaagaagtgatattcagtaactcgaacccaaatgaagagataaagaatcacagaactgataaatatgtagatacatataaaagactgtacaaatatagatatatgtttttcttcttttaacttctttaaaagacctaagattgcataaaaattataacattgtgttattgtgtttataagcaggaggagcaaaaatggagcttagcagagaaaaatatctaaattttactgtgttaaattagtttgaacttaagtaaattatgatcaattaagatgcatatgtaatctttagagcaagcactaagaaaataaatagttaaaaacaaaatttaaaattacacactaaaaataactaacaagacagtgcagtaaaggagaaacaggaacaaaaaagacatgaataagatgtgaaaaaatacaatatggcacatgtaattgcaactaaaagttgagaattcccattaaaaaaatctgaaatttgaaatgctctaaaatgtgaaactttctgaaggttgatataataccacaagtggaaaatttcacacctgacctgtaatgagtcacagtcaaaacacagccaaaactttgtttcatgcaaaaaattatttaagatactttataaaattacctccaggttatatgtataagatatctattaagatatatatatatacatatatatatatatacatatatatatatatacacatatatatatatatatatgtatatatatagtatgtgtgtttaaacttaggtcctatctccaagatattaggtatatgcaaatattacaaaatctaaagaaatccaaaatccaaaacacttccaatcccaagcattttggatatgggatactcaacctacatatcaatagttatagtaaatgggagtgaactaagcattccaattataggcagagatttcagacaggattatttaaaatatccaaccatagtttgtttaaaagagaaatgtattagagccaaaaccatataatttcaaagaaaaaagaggtactatgcaaattgtttacatataaaaaatgaagtgacaatactaatgtcagacaaaatagactttatgacaaaatatgtaacaagagaaaaagacatttttaattatataaggggtcaattaagcagaaaatataacaattataaacgtatataattaataggaaagtcccaaattctatgatgcagaaattgacagaattcaaaggagaactagacaattcaacaattattattggagacttcaaaccctactctcaatagctggcaggccaattagacagaaaaatagcaacaatatagaagaattcaccaacactatcaaccagcttgacctaactaacatttataggagacgccaccaaatgaaagcagaatacatattattttaaagtgcacatgaaattttctctgggatagattctatgctaggtcaaaaaacaaatctcaatacactcaacaggcttgaattcataaaaattatgttctcttaatatgtcagaattaaattggaattcaacagaaggaaatttggaagatatcaaaatattttgaaattcaacaacttctaaatccattggttaaaaactaaatcacataggaaattataaaatattttgaactgaataaaaataaaagcacaacatgtcaagatttataggatgtaactaaagcagtgcttacagggaaacttctagttttaaatacctattttagaaaagaataaaattcttaaatcattaactcaagctttcgccataagaaactagaaaaagaagaacacagtaagctcgaaggaagcataaggaaggaaataacgggggttagagcagaagtcaataaaatagaagaagaagaaagaaaaatcaatgaaaccatacattaatctttgaaaatattttttacatggagaagctttagctagactgaccaaaaaaaaaagaattaccaaaatcataaaggaaaaaggggtaattactaccaaccctacagaaattagaaagactagaatgtaataacatgaacaacattgtcaacaatttctgcaaaacatattaaatgaaaaaattcttagaaagacataaattaacaaaactgattcaagaaaaaaatagacatatgaatagacctaacacaaacacagaaactgaattagtaatttaaaattttccaacaaaaaaacccaggtccaggagaaagataggaatccgaggcatccacagtatagaagaagaaatgaaactctctttattcacagacaatacaatcctgtatgtagaaaaatctgatatccacaaaataactgctagatctgataagttcatgaagcttgcaagataatcaatatacaagaataaattacattcctgtgtactagcaataaaaaattgaaaatgatactaagaaaataatttcattctttgtagcataaaatagattaaatggtcataaatttgaaaatataagtactaaacctgtactctgaaaactgtaatacattgctgagagaaattaaaaatctaaataaatgggaccatattccatgttcatgaattggaagactcaatactgataaggtagtgattctccccaacttgttctatagatttaatgcaatctccatcgacatcttagcagatgttggcacaaattgaaaaattgcacaatcttggcacaaattgaaaaattgatcccacaatttatatatagcaattcaaatgtaccaaatagccaaaacaattgtgaaaaagaagaaaaaagttagaggactttgaaatcaggacattacctgatttcaaatcttgatgtaaatctgcaatgatgaagacagtgtggtactgtcataaggacaggcttatagatcacctgtaggtttaggaaacaaacctattcatatttttttcttaaatctactaactgcactcctaatgttgacaatggaagagactcgatagtccagcaataaactcttatatttatggtcaatcaatatatgacaaaggtgacaagataatccaatagaagaaaagcttattattgggtagcttattgttagtgtacagaaacagagctgattgttaatacaactcaacaggaaaaaggcaaataacttgatttttaaaatatttaaatatatatttctccaaagaagacatagaaatggccaacaggtatgtgaaaaggtgctcagcatcactagtcatcagggaaatgcaaatcaaaacctctgtgagatgaacactatcatctcacccctgttaggatggctactataaaaacaaaccaaaaacaagagataagaaatgttgttgaggatgtgaggaaatcggaacgctagtacaccataggtggtaatggaaaaatgatgcagctgctatagaacacagtagaaaggttcttgaaaaagttaaaaatagaactaccatatgatccagcaacctcactcctgggtatatatcccaaagaattaaaaccagaatctcaaaaagatatctgcactctcatcttctctgaagcattattcacagtagccaagatatcaatacagcatagctgtgcatggaagaatgcatggataaagaaaatgtggtgtattcatacagggaatattatttggccttaaaagggaaggacgtcctgccatatttgacaatatgtatgaacctggaaggcattatgctaagtgaaataagccagtcaccaaagggcaaatactgaatgattccatttatatgaggtgtctgagacagtcaaactcgtagaaccagagagtagaatgatagtaaccaggggctgggcgaagggggaactgggagttgctgttcaatgagtataaagtttcagttatataatgtaaataagttctaaagatctgctgtacaacatagtgcctgtactgtgcacttaaattattattaagaggatatgtcttaagtgttcctaccataagaagaagaagaagaaggagaaggagaaagtgaagaagaagaaagaaaaaatgaagggggcatgagcaaacttttggagttgatgcatatacttggttaccttgattatggggatggtttcatggttgtatgcttatatcccaattcatcacattgtatacagatgctcctcaccttaggatgggattgtgtcctgataaacccatcataaattgaaaatgttatgagtcaaaagtacattttcaattaatgatattttcaacttacagtgagtatatccagatataaccccatcctcagtccaggattatactaaatgtgtatcgcttttgcaccatggtgaacttcaaaattgtaagtcaaaccatcgtagtcagtcggggaagatctgtttgttaattatggacccatcgtgtacaccttaaatacttaataaagctgttaaatgaaaattaaaagttgactgggcacatggctcatgcctgtcatctcagtgctttgggaggccaaggcaagaggattgcttgaggccaggagttcaagaccagcttgggcacatagcaacattccatctctacataaaattaaaaatgtagccgactgtggtgatgcaagcctgtagtcctagatgctcgggaggctgagttgggagaatttcttgagcccaggagttggaggttacagtgagctataatcatgctaccacaccccaggagaccctgtctcaaaataaataaatagaagctttaaaaaatattggtatctcagtgttcctcattatccactgtatttaaggtttagctacttgtgcttgatgcttgacaaggtaatcttacttttctccctgatattggtatgatgcaaatttactatatatatgacacaaatttatatatgcaatattttctcgttaatggccttttattttactctcattttcattatgctttgccttttaagtcatatagcaaataaattatgtggcattttcttagcaactattaattcaggagaatgggaacagaattctctcatagattcagctggaaggtaatgatggtcagctcccagtggagaaaaaaaaaaaaactcccttcagttttcgtaaacatacagagaaattttctcctaagtgctatgtcagtctgctgtatgtcctattgatctgagaaccagaaaacacatattttagtttacactgccttgactctattgtacatggctaggtctgtttaaaaaagaaatccttgaagataccctttggattctagtattttaaaacggatgcttagctaagtgaagtggtctacttcaaggatcaaaaccaatcttgagtaatctgttaggtagactccctaagttcatctgtaccttgtaccaaatttttaatgaatttagtaattgacatggatgtaaaataaataatacactaataaagttcatgcagaatcaaattttaatgcccagaggtaatgtagaagatattacctgtccatttctctggacttagctcctgcaactctccatttttctctctaaactttagccacactgaattcctagtttcaattcctctgactcgctaagtatttcttctaccttgataaaagctaattcctttgtcttgtaccatctgtattccggctgatattgacatagttttcagggctcaatttcaatgttacttactcagagggactcactgttacaaccaccacagccttttcaatctaagtaagatccactgctcttcttagaaacaggttatattccaaatgactgtaagtgcttttgttcttagaacatatgtctccattcaaaagaccgatagatattcagttaagccctttgagaaaattataaatgttgaggaccttgattattattgttattattgcttcttttctatgttttcccaggactctcaacaaatttgctttgcttttgtactcatggcacataatgagattaataatgtttagaaaacatttcaaaaatacacacagaggagacacatcttagtctaaagttagacatgataccaaaaactataataactatagctgaccagtgaccccatttattcatggaaagtaaaatttgatgcatatttgcctttaggagcaacatacctatgaaagttctgaaagtgaaagtttgtaaaaaaggagtactctcctaacaatcttaatttttttctatatatatgtatggtttgcattaaactcttttgtatgattagtggtttaatgttgatgtcacccatgacaccataagctacgtgtatggactggctctgttttgttcactcctgaatatccagcaaaaatagtatagtgcctggcccttggtagatgtgtaataaatgtttggtgaatgcatagctacacttcaatgcttatcgcattttaatcccagctactcggaggctgaggcaggagaatcgtttgaacccaggaggtggaggttgctgtgagccaagatcgcgccactgcaccccagcctgggtgacagagcgagactccatctcaaaaaataaaaacaataaaaaaaaggagacccattcatgtatctgtatcactgactagcctgtcaacattttgttaactacctcatcaagtagcaaaatcagtacctggtatgtggtagatgctcaaatatttgttgataaaatacagtaagttaatgacaggcgagcttgcctcagtgaaatataatctgtaagtgagcagtgtgtatatcatttgaaggtgccctacttagcctagcatatcacagagattcccagtaaatatttaggcagttcattaactctaaaagttgaccctcatagtcattggcctacattattcacctccctctgtctctaataaattcattggcaaatttctgaactccaactggaatgtttgtggtggatttcttcatacctaatggattatttcaattttcattttacattgtattatttacttgtctgaggtctttataatgacaaactcggcatgcatgataagctgtcattacttatgccagttgacaaggacatattatttttctacaaaaaaaattatcttggccaggcgcggtgcctcacgcctgtaatcccagcactctgggaggccgaggcgggcggatcacgaggtcaagagatcgagaccatcctggtgaacatggtgaaaccctgtctctgttaaaaatacaaaaaaaaaaaaaaaaaagcagaacaaaacaaaacaaacaaacaggagtggtggcgggcgcctgtagtcccagctactcgggaggctgaagcagaagaattgctcgaacccgggaggcagaggttgcagtgagccgagatcgcaccactgcactccagccgggcgacagagtgagactccgtctcaaaaaaaaaaaaaaaagtggtaattgttcaaaatatttacttattaattcattttaaaattgcatgttgaaataaaaaataaatgtttagtttttaaactatctcttctacaacagaaacaatatagtgagaagagtgatcttgttttacatttttgcaaatctctttaaaagttagcttaagagaaggcagctggttcttatatctgtttctgcattgaatgtgctgtcatatctcgcatcatgtagcctctgaaaaactcataatagaatgagagaggaaaaagtcaaataacatcttagtattattacgaaaataatttggacctcacagaaccactgcatgggtctcagggactcccaggggtccccagaccacatttaaggaaatactgtttcagggaatataactatttttgtacctcctgtggctatattcttttaaagaatagtaacctctgtttctgaggaacttagctgcaattatgtgcagagtttaaataagtgaaacggaaataccctttgcctttctgctcgagtatgaaagtgatgatcaaaatgttcccttttctctctctctctctctctctctctctctctctctctctctctctctctcactctctggggaacttcgggtttccgtctctatataatgtattcatattccactggaaacatacatagtttgagaaaacagatgacattttttctgggggtggaaagaattactaccacgaggaattcaaaatacagacacagtaataaaaatcaccataaagcccagaggggaaaaaaattgagtaacaaaataggaggtgaaattataaaactgagtaacaaaaaagaggtgaaattataaaataaatgataaagttggttgtgggttaggaagaaagagaaatataaagaaactggcataatgtaaaagccaagacaagaaaagtgaggcagaggcataggtcttttgactattttccatgtttgattctaaggtaagtagatatagtttctcatagttggaaatgttcgtgaatttaaacagaattaatgtttataatcagatgcaatgtctagtttttctatttgtcctgtgaaataataattgtgtaaagtgctcatgattgtttcaaggggtgaggagtagttctaattatcatagatattttcatgacttcgcataccactggtttatagagattatacagattttcttatatcagaactctcgtatctttaattccctagtagatgtctaagaaggagatttatcacatagcagatggtggtaaacttgagtaaagtgccagatactaaatgcctttggctttgtgggccattcaatctttgctgcaactactcaactctgctattgtagcatgaaagtaaccatagacaatatgtaaatgaatgagtgtagctctgttccagtaaaactttatttacaaaaacaggtggtgagcacaacttggttcatgagccatagtttacaaacacttgctgtatagctttccctggttgaatttcgttaattttatacagaacctgcctcccatacacacacactttgttcttcatggaaaatctccccagactactatgaaataatgttattacttggagatatacaattaagatgatgtcattaggagattattaatataggaactaagcaaatactatatgctaagtactgaggatagggtgcgatcacaatagatagaaaatctgcaatagtttgatgaacatgggaaattacagtatttcctgtgatggaaacattatgaggggctgtgggactacataacaggacctgtgacctatacctgggttggggatgtctaattaatcaaggaaagctttgtagaggaagtgatgtctaacctgagattggaaaggtcaacctggagctacctagatgaagatgtatggaaggacatcccaggcagagggaacattgtatgatgaatcctgatatggatatagtgctggattttaaggaagagtaagttgttccatgaactatacagtgcaaagaaagatgaagaaatagaagtagagaccagatcacaaagggctttttgaccatgttagagaagttatattttatcccattggcactaggatgttgttgagtatatgaggacatgatcagcaacatattttagaaagatctcttattctgaagtgtaaagagtggataagaaggagacaaggtaggaggcacgagctaattagaaagcagtctcagagaggctgttagaaatcagaacagaatggctattattaaaaagtcaaaaaacaacagatgatggtgaggcttcagagaaaagggaatgcttatacactgtttatgggaatgtaaatgagtttaggcactgtggagagcagtttgaaaatttctcaaagaacttaaaagagagctgccattcaacccagcaatctcattacttggtatatatttaaaagaacacgaatctttctaccaaagagacacatgtactcacatgttcgtcgcagcactatacagtaacaaagacatggaatcaacctaggtgcccaccagtggtggattgaatgaaataaacgtggtatacatgcaccatggaatactacacagtcataaaaagcatacagtcacgccttttgtaggaacatggatgcagctggaggtcattatcctaagtgaattaatgcaggaacagaaaaccgaagatagttagaagctaaacattgggtactcattataaaggtgaaaacaatagacattggggactactagaagggggaggaaggagaggggcaagggttgaaaaactacctatcgggtactatgctcactacctgtgtgtggtgggatcatttttaccctaaaccttggcatcacacaacatactcaggtaacaaacctgtacgtatactacctggatcaaaaataaaagttgaaatcagaatgagaaggagcgaaggagacagcgacaggaggatggagagaagtgggcagattcaagagagatttctcaagtggacttatgaggacatgcttattgatacgctctgggagtgagggagagagaagaatcaaggatgacttctacactttcagcttaaaaaaccgggagctggtggagtcatccattgaacttgacagaggagcacgtttaggcaggaagatgatggtgtttgaatgtctgcgaagggaaaaactgaactgggattcaaatcagaaaaaacggtttgaagtcataccctcttaattgcattttctatcggatggtaatggctttgtgacaggctttactgataggtgatgtaactctgcctctgacagatgaagatccaaagcatcctcagattttcccgaagcctgtttcagcaactgtgtagacagcacacacaaaaatctggggggaagtcctagggctcagttagttgattggatctattaaagtagcattggagaacacagttcagtctgagatttcccaaacatattgctctataatttatttttacccagaaactgaattcgatgtgggatagggattataaaagccttcagattccagatagaatctctgaatagaaggcttttgggccacatctagtaatctcctttcctcactccatttctgaacttcttgttcacttcttcgctgtttttaggacgttcttactacactcctgcctcaaggcctttgtacttgttttctctgcttagggcgttctttcccgcaatatttgcatggcctcctccctcgcttctttatttctatattacctatctttattaaagctgctataaaaaaaaaaaagcccacacctcagtggcttaacataatagaaactttccgttcatgcaaactttacaaaaattttctggtcaacaagtagatttcctccaaatggtggatcaggggggcccagggcacttcgcttttgtggctctgatgtctttaacatacggatttcaaaatcactgtgctcttgtacataagaatgaaaaagaacaaggaatattacatatgtggtggtggttattggaggtggggttatgagccaggcttcatattcatgagcatcacttttgctcacactccattggctcgaactcagtcatgtagccaaactaatggcaagggagactgggaaatgacagctagctgcacaattaagagaaatgagtagacttgtctaatgagcagctagccagtccctaccacgaggactttgctcaaatgtctccttctccatggaaccttctatgatcaccctttataaaatcacaactgctccccatcttcccctcaatatttccatcccttttccatgcttcatttttttcctctgtaacacttactgtatcacaatctatagattttatttctttatcttgtttactgtctgcctccccttcctcccaatcggatgtaaggtccatgaggcagggattgctgccgatattcacggccatatcaatggacactagtagaccctcaataaatggctgttgcattgtgattacatatatgcttcacctagaagtagtctcatctggtggcacatttactcatagattgacattaattctctattgttttttccccagcaaaatttgtcaaggtagtttgtcagtagggagaaataaagttgtcaggtggctcatcaaaagttcaattttgagtactcctcctgtgtactcataatgttttataaatacttttatctatgtaagcacgtgggcttagacacaattctaggattaaaacagaaagctctgtatccatattttcccttttttgtacctccttttatgttctctaccattttttttgagtgctgttagtgaagcactaggctaaatcttgggtttctgcaaaaaaaactttaatcctcacaacactctaaaatgtttattgttctaattttaagacgaggaaactgagggctaaagagattaaggaactcgcccgtgttcacgtactcagctgataactggcagcatttagatttggacttactttccatacagatattcgcattgctaaccttcaggtttttccctcatcgttttccacatctactcaaaagttgctaatcatttccttaatagtgaggcataaatgactgagaaatcttgatatattatccccctcaggagcacttcattccgacaagacacaaactttagggaaaatgaacaaatgtctacttgtacaactcaagcaccaaccaggtatggtagacatgttggcttaaaaataaagttgatgcttgggttctgattctgataatgacctacggagggtatggcctgaggaggttactaggtgtgtgtagaaatcaatgttttgttttggttttccctcgggaagggtcaacttatacttgaatccttctgaagtttctcaaattacaagatggtcatttattttacttcaatcaaaacaacaaagtactgtccgggaaagatgtattgccttgacttattctcaatttatgcttattttggaggcttgtagaagtaaacctgatagaggagggcaaaaacacacacacacagacacacacacactgggagaaaataaatttaacacagtttagggattgactttggttgtatgacatcacaattgcaagagttggatgccattgtaaacaagctatggaaagaatactgttaaaagtaactcattaagtggttacatggtgtagctcatggacatatggcacagaaaaaagataaagctgtctttacataacataaaactgtattctgttatgtaaatgtgtgcttgtggcttgcagtaaaattcctagtgaaacattacctctagattcagcagtactatacctcaggccacatggatgtaagtaaagatgatgccctctggaaaactgagttaggcaacaacaagtgcatccatgaggatgcaaatttcaatgttgaaggtgcctgtgaagaatttgaacaaaattgttgcatgaaatatgaatgaagaagtgtgatctaatgacataatattttgtactatataattttaaagtagtacacacaatcaaattaatgaattaaacattatatgtaaacaggtgatcattgtatctccattttctaaagtttctatgttaaaggtgatcaaaaaacttggagagagggacttctcatttggaaaatgggatagtcacctttgggtatgtgatgtatcaatctctagaacttcagtttcttcattgaaagcatataaaaggcaatccaaaggatgtatggaatattaaaagattccactgtgaaactatctagcactttacctgaaacacttgttagatcccctcaccaaaatcatgccatgtgatttggcagtctattcctcttagcgtaagagtagcccgacagaaaatgttcattaagagttaatgttaaattcattgaatttagcaacacatgagtagcgcttcctttctgattatgcaaatctctcaccatcgtaatacgtgcttcctttaatttcattgggaacatttgtaatgtaaatggtaacagagccaatatttcaaacagaagccattctttctaaaaaaagctaaatgtctaaatgtattgaaatgcttctaaaagtaaaatatttagcacttatttgcagatgggtaatgttaaatatctcactcattattattactaccacttgtctgaataaatcctcccataagcattaagcaagtaggtaaacaaagaaataacacttcatgtgatgaatgccaatatgaagcacgtttaaactgttctgtcaagagacaagcctggaaatgctaactgtgtttctttgcttttctgcaatcatctgaatacataaattcaaattgcagcttttaaaacttcaaatcgaggcttttgaaatttcagaaaacacatgcgcttggaaaagcagattataacaaggtcccaacgggattttgtcaccatcttttttatatttcaaagtataaaaaaaatctagataagaaatgactaccaaatgttttcatatttaaaagatgctgtttttttaaaaaattaaatcactggaaaaaaagttttccacaaatatcgtgtaaaaagaaagacagcaaaaagcttagccaaagcttttactgtttaagtgatgatttattctgagagttcttaagagttttctaaattagtatatggttaatatccataaaatcatatgcaagatgctgtctttcaaattgatgctgaaggttaattataaaatgtacttaattatttatagtgtcccattgagtcccagatactctgtgtccaagaacactgtaaatacagaaagtttagcagaattatattggaaaggcagtaattcttcacaaattaacttattgatataatgcaatcccatttaaaaattttcagcgagaattgttttataatttgactgaatgatacattacataagttagaataactaaagtgggagagcgggttaacctaccagaaattaaacatattttaaagctgcaataattgacatagtgcattactgtcacaaaaatctacagtagatcaacaagcagaaacttaaaatatcatgaagaaagcaccataaatcaattcagaagagatggtgctgggggaaaaaatatcagtttctgaaaaactcttcaaggttagaaacaacactatataaatttaagatggattaaatatttggttgttcttttttaacaaatgaaagagtaaaggatcaagaataaatgagaatatctgaacaatggtaaaatggccacaattttaaggatactatcaatgaacataatatcaaagaaataaactgttaaattttatttagaaaaaactactaaaaggcaaaaaggaagctggaaacgtagtctcaattaatctatgtttcagataatgtgaaaagagctcttaaaaataggaaaacacaggaaaaatgggcaacagacattgccgataattgacagtggaaactaaataaatgacaaacatgtacacacatacaacattttcaactttcctattagtagaatacttaaaatatctatggcaagctttttatttgttttattggtatatcaattataatgctcaatagtggcaaaagtgtagtgagacaagtattttgtaactgttggtgggagtttacgagtgttctgagtaccaaccttgacagaaattcaacaatgtgtatctaaatccttaggattcccattgttaacttttcattctcattccagcagatacatgattcaaaatgtataaataaatgtgtttattgtagggttattcattataataaaaaatgaaagcaaacaaaattcctaataacacaataatggtgaaatatagggtacccctatatatcttattactaggatcttaaaaaatcaagtttttaaagcgtaattaatgacctacagagacacatagtagaataataaatgaagaaaataagcatacaatatagggtttgaacccagtaatacatataaatctcaactatgatgaataagcacaacatctctcctctgtactggatattcttgatagaaaaaaatatgctagtaaataatttgagacatatttgaaaagaggggagtgtttgatttagaattttctaaacttgagggttattattatttttttggtttgatattactttttcctgctccttaaatttttgtttgtttggggggtttggggttttcttttccttaaacgtgtctgcttctagatgaaagttgaaaatgtttaaaagccttgccaatgtgtctaggtttttcaaatgtaatcagattttagcaagattttacttaactaaaagtattcagaacactgtgcaaaatcatctggagtcaaatagtaatggaggcaatgatttgcagagtagaaacagagagagagaaaaagatgagatagaccctcaaaatctagacccaaggaattaaatctgcttggaacatttaaacaaataaaggatgcctgtactatactagacgttttcttcttccacaattgattctaaggtcagaatctgaggggaaatggtgctgttccacattctaaaacaaactgccagcaatcgagaccagccacttccccatagggtttactctaaagcaacagggattattatctctattccaagcaatttccaatctcctctgtactccgtgtcccaggcaagattaaaaagactcaggtaggaaggggtagtaagctttgtggggagtgcagtttgtggtaagggacagttccttctctttcatctctctgagtcagaagtagagacttcgagagaatcactgagagtaagtatgtagactccaagaaggaaaaagcatcctctcacttcaatgaatgtttggaatctgcagacctccttcccaggtctgtgtagcttttggagaggccagaagagcaccgtaggcattcctttggctttccatggccaagcacatagagtagaagaagaggaggaaccgtaaggttaaccatacataagaaatcaacaaaaggctttgaaattgacttttcctatttttcaatttaaataagagagaattgtcaatgattaaaattcataaaacgaagaaagaatggactcagaaaatagcaaacatgaaatgttaattattagttcaaaagttagtttaccgtgttttctctgccaactgattgctaatgactaaagtccttatttccagctttcctctctccccgagctccagatctcttgatttattaaactagtagtttccccaaaatatatgagacaacaaaatatactctcagctgaagtaaatagcattcatcttcccagtcagataaggcagaagtacttctagatcagatgttatattcgggataggttaaaaacagaccctgctcccagtgtcccaggaatgaacagtggatgtgcttatttctcattgcatgcgtgtatcaaaatatctcacgtaccctacaagtacatacacttactatgtccctacaaaaattaaaaacaataaatcataaacatttgtaaaaataagcgaataaatgtataaatgaatttaaaagagaatagacagaggggagaatgtaactttacgtgtcccagaacagactttgaacaggctcttatcatataggaaaactgaatgaatatatgcaagcataagtccaataaccagattctgatttacagaatgatcgcaactgtagttctctcaaggccctgtctttgaacaggctgtgtcttattcctgcaacatgctgatctatcttcatgcttcaagactcagatcattatcttctctgggatgtctcccaagcactgccccagaaataacttctcctcctataatacttaatcataatccttggcttacatgcttgtttcttctcattgactatgaaatcctcaagacaaggtatataacgtatatatctttaatcctaatgcccaattgagctcttagaaggtagtaagctcccaatacacatttgttaatttgaagcaaaaaaaaaaaaatagctaatcattcaaaaaactgaattatcacaaatgtccatctaaagtactatatttacacaattaaatgctatacagccaggttaatgaacagactaaaattatatgcaacatggattatcgtaaacataattttgaatgaaaaaggcgagacacaaaggagtataaagccatacaattccattttcataatattcagtaccggcaaaataatcaaagttgacagggtactggttatacttggaggcagtgactgcaaagggataagaggagatttctgagattctgataatattctatttccttctctggttgtacagtgtgttcaatttttaaaacactattgggctatacagttaaattgtgcagtgtcctgtacgtatattacacttcagttaaaagcttccatggaagctacacatagttcccaaaagacaacaaaacaaaaaattttcaattattttaagcacaaacaattttgttcagctgtcttacaatcgaatatgtaagaataaatttatggctaattagcatagagttatatgcattttcataattaaaacttccacgagtacaacatatgttaagtattttaaatcagtttttctctttcctcaaataaggttgtgagtcataattcggaaaacagtttagcatgtaataatttagtgttttattttaaaccaagctgaagccacataaagcagaactgctcaactgagccctatccaaatccttgacccacagaataagaagcagataaaatggctgctacttaaacaaaacaaaaaccttgtttatatttttgtcctctcattttccataagtatactttaattaaacattttaaaacttgtaactttaggttatatacttactttagttggttctcaaccagggacaattttgtccccacccccaaccccccagcatatttggcagtgccttgaaacatatttggttgtcacagctcaggggcgaggtgttactactggtatccagtgtgttcaacaggccagggatactgctaaataccctacaatgcagaggatagctgctcacagcaaagaattttccaaacctaaatgttagtaatgctaaagttgagaaaccttgctcagatataatgacataatgttgttagaatttttattttattcattttaatgtatgtatgtatgtatgtatgtacgtacgtatgtatgtatgtatttgagatggagtctttctctgttgcccggggtggagtgcagtggcacgatctcggcttactgcagcctctgccttccacgttcaagtgattctcctgcctcagcctccctagtagctgggattacaggcgcctgccaccaaacctggcaaatttttgtatttttagtgtagacggggtttcaccatatttgccaggctggtcgcaaactcctgacctcaagtgatccgcccacatcggcctccctaagcgctagggttacaggcatgagccactgcgcctggccaggaatttttgaatcagaatttttcttgttcgattttaatctcttatcatttagagattcttgaaatattgaaattactttgttcaaagtgaatgaattttcttaaattatgtatggttaacatcttttaaattgcttatttttaaattgccatgtttgtgtcccagtttgcattaacaaatagtttgagaactatgttggaaaaaaaaataacaattttattcttctttctccaggctagaagaacaaaagaatatcttgtcagaatttcaaagagatttaaatgaatttgttttatggttggaggaagcagataacattgctagtatcccacttgaacctggaaaagagcagcaactaaaagaaaagcttgagcaagtcaaggtaattttattttctcaaatcccccagggcctgcttgcataaagaagtatatgaatctattttttaattcaatcattggttttctgcccattaggttattcatagttccttgctaaagtgtttttctcacaactttatttcttcttaaccctgcagttctgaaccagtgcacataagaacatatgtatatatgtgtgtgtgtgtatttatatatacacacacacatattgcatctatacatctacacatatagatgtatagattcaatatgtctaaatgtatataattcacagtttttatctttgatttgaaattaattttagattttacttgagaacttcacaacttcatataattttaaaaactgaagaccagattgtggaatcataaaatctaaatctaaatgggaatcacttttttaatctgtcctggttacctacctggagatttgagaagagtctttaaaaagaagaatccattttcttagggaagatctggattgccagatcagtctcaccacttcagcctctacttaaaggcattatattcccccgaagcaatgttttgttttagctgatttgtctgggggtgtgggacgtggtgttggttcacattccatttggttgaatagacatccagcttattccagtggcttttcataccgtcctactgtgatgtctgcttattactgattacttcccttggctgactgacatgctctgattgtgcaattggattaactttcatggttttagttttaggaaagcagctcttttggatctatttcattttagttgtcaagcagaaggtgaaaggggaagagaaattaatatttaatcattccctgttatgtgccaagtattagatacatttacagccactattttatttaatcttcatatcagattttgacaatggttgctattatcctcattttacacggtcacataatcaaagggaaatgaaattggtcctttatcaatgattcaggtgctttacacatgtaaattagagtccaatgtcaaacgtttatttctgtgaaacaagaggtttacacctgaacaagaaataaagtataaaaataaaatatggcgtaattcaataaacaaatatggagcactgactatacatccgatgttttactaggtatttgggattcaaaaatagaaaagagtgggaatcatttgaagatggttataccctagaacaatgaactcagtcttttcttggaaatttatctttcccaaatgtattgagtgtcatatatagtaatataattgataattcattcgaaacatatttagtggcattttcttattaattaatatgcatgagtctattttctcctgaaagaatctagatcagtgctttcaaatagaactcccgtgatgatgaaaatattctgcatcatccatttttgtaacgactagctatttgtgccttttgaatacctggagagttggtcgtgtgactgaggaacttgagattttattttagtgaattttgattaacttgaatgttaatagcgttgtatggctaatgggtactgtagcagacacagtaactttagttgacaaaaatgaagtgttaacaccatggtgattttggaggtcttgggaaagggcatacactatgtggtggtgaatgagttcgagaaatttagggatatgaagtaaaaaatgaggactccagaatgaaactacccaaatttgaaccacacctttgttgcttgctagatttgtgtcctgggagctggtatttaacccctttgtctcagtttccttccatataaaatgaagataattggatctacctgatataattattataatatgaagataaactaagataataaatgtgaaaaggttagcacagtgcctggcactgtgtatattgagagtcaatactctcaatgtcagttacctcttaagatgataatgcaatttctcagcagcaagctacggtatgctatggcatgctatgatacccaagaggctgatgaatttgttcacattgttctatttctgatagagagataggttttcagacactaactttatttggagtgttgctttaccatctcacatttttctcttaaaaaatttatgagggataatataatcgtttattttctacagagatttatctactgagggggtgagtgtttcagtcaatcagctctgtgctcagatagaaaactgttggtatttgaggtaccactgggccctcggtcaagtcgcttcattttgatagactaatcaatagaagcaaagacaaggtagttggaattgtgctgtaattcattttaaacgttgttgcatttgtctgtttcagttactggtggaagagttgcccctgcgccagggaattctcaaacaattaaatgaaactggaggacccgtgcttgtaagtgctcccataagcccagaagagcaagataaacttgaaaataagctcaagcagacaaatctccagtggataaaggttagacattaaccatctcttccgtcacatgtgttaaatgttgcaagtatttgtatgtattttgtttcctgggtgcttcattggtcggggaggaggctggtatgtggattgttgttttgttttgtttttttaacctgaccgtttgctttggctatatgttttgttgtggctagaaaaaatgatgatggtgaatggctttacattaatgaccaaatgccaaaatttataccacaattttttgcataaattattctgaagaatcagactgaagaaatggcgaagtatttaattcagtggccaggcatgtactgacagtatttaagctgaaaggacgtggtctggttctagttaaacaagtgtcataaatcaaaattaattattcacacctgtggtatggacttaataattaatgtacactaacgttcgccacaagtttatttatttacttacctactgatttattaacttgtgagttttcatctttccaccttgcatactatataaatctaacagtaatactatttattaaattaatacatatttattttatataaagcaagtggtacatatgaatttatagtaaaaagcaacatcaattgatccagcactattcattcaaagacaatcatttccccactgtattttcatggcatctttgtcataaatcaagagaacttgtatgtatgaatctgcttctggattctgtatcctcttccatttgattaaatctgtactttaacaacagtacttcactggcttaattacaatcttttttttaaaacaatcctaccgagctataattcacataccattaaactcatttaaagtgaacaattcaatcgtatttcggtgttacttttttaaggtgtgataaaatatataacataaaaaattgtcattttagtcatttcgtgtgtccagctcagtggcatttattacaaccatcaccacagtttatgccccacccccaatttttttttttcttttttggagacagagtctcgctgtgtcgctcaggctggagtgcagtggcgcgatctcggctcactgcaacttccgcctcccaggttcaagtggttctcctgcctcagcctccctagtagctgggattacaggcacctgccagcatgcccagctaagtttttgtatttttagtagagatggggttttgccatgttggccaggctggtctcaaactcctgacctcaggtgatccgcccaccttggactcccaaagtcctgggattacagcgtgagccaccgcgcccagcctccaaaattttttattactccaaccagacagtctgtaaccattaagcaatagttcccctttctctctcttcccatccgctagtagcctctggactactttctgtttctatgaatttggctattctagatcttttatataattggaattatatatttgccactttgtgtctgccttacttccctcagcataatattttcaaggttcatctatgttgtagcatgtgtcagaacttcattcctttttatgactgaataatattccattgtatgtatatacgcaatcattttatttaaacattttggatctggttgtgtaaaccttccactttgttcttcctattcaagattgccttggctacttttggttctttgaataaattttagaactatattgtctatttttacataaagccttccaggatattgattgaaattttgtgaatctggagctcagtcaacatctttacgatactgagtcatctaatttgtgaacattttgaattgtgtcaggttatttattgtattttttaaattggtgatgctgacattctaataacagatcatttacacgactgataaaatatttaggaactaaaataagtaccaattttatgacattaaaaccataatgtgcgcttaagtgtctctatttcaagcaggtagttatttgaaaaaaaaaaatcccttcttggtttctacctttaatgattgcaaaacatctgtgtaaagatacagacttttatgtatggagggaaggtggtgtcccagcaattaaattttatagctacataacaatacaaatgaaatcatccctcataaaaagagaacaaggaggaaggatacccaaaatgttctacaatatctcagtacatcttatgacaaaaagaagaacaaaaattataattgtaggaaatgtgagagaactatctaaaatatacaatagcagctttgtgggttgtgaaagagtcaaggttttatgtgtcctgcaacagaataaaaagtcaaatttttatgatagaaaattaaaactgaggttacgaacaccatcatgtatagacttatattactacagcatccataatatctgtttcctatgccaaaattataattttaatgcaatgtctttgccattaaatgccacaggatttggaattttattcattagtcatattaaaattatttaatcatcttttctccatccatatgcctctgtatccctgttagtttagatttagggatagaaagcaaatgatcagtaccagatttaggtaaataacacaagtttttttaaaagtaaaagaaaatggcttataacactggcagacagtcttgatcttcattaaatctcaagctcttacttattacaggagggtagaaataaagcggaccccctccctgtgtcctccagccctacccttcatccaaaggttagagtgggtgatataattggaactagtgggtcatagttactgtgacatgaatatgtcaattccttagtacatagtatctccaaacatatcctaatatcataatcagttggcaggtgactttctccacagctaactctaatatgctgcattctgcgtattgagccaactgaccccttactcttgtacctttattttatttttttttttatttattttttgagacagagtctcgctttgtcatccaggctgcagtgcagtggcacgatctcagctcactgcaacctccacctcccgggttcaagtgattcttctgcctcagcctctcgagtagctgggactacaggcgcgcaccaccacacccaactaatttttgtatttttagtagagatggagggttcgccatgtcggccaggctggtctcgaactcctgacctcatgatctgctcacctcagcctccgaaagtgcggggattacaggtgtgagccaccgcgcccggcctgtacatttatatttcattactgaagagagaaaacagcaggtgaagataatatagctatttctttaagggagtggtggacagggttgctttaaactgaatatagccattagcgtaaatttatgggtagcttcatgcaatgaaggctcatgaaatgatatcctcattcttgtctaatacataacttgaccttttacagcctttaacaatgatacccgtaagagccacaaagtggggatgttattaaagctagcctctgtgttcctctctctgatcatctcattctatgatcttcacccacacttctgactcaggtgtttttaatatttatccctcttcatatttctttgtattttctctgaacatgcatgtgggtgtaggaggctctctcgccatcatcatcactctcttcctctgtgtttctcacttttaggctaattttcatctatgaattgacacgtatattataggaatttatttttatatatttattaggaatcttctttttgttttttttttttttttgagacagagttttgctctgtcgcccaggctggagtgcaatggcacgatctccactcactgcaacctctgtctcctgggttcaagcgattctcctgcctcagcttcccgagtagctgggattacaggcatgcaccaccacgcctggctaatttttgtattttaagtagagacggggtttcaccacgttgatcaggctggtcttaaactcccgacctcaggtgatctgcccacctcggcctcccaaattgctgatattacaggcgtgagccaccgcacctggccatgaatctacttttctatttgcatatttgccactctttttctgccccagttgtttatgtaacacattctcttctgctctccttccctgaccccgttaatcccagtttcatctctttcatgtctttttattttgtgtcccctttcctcattcttcattgctctttgtatatgttatatgtgggtatttttttaactacccatttatttaaaaccaaaatatgctttatcattctttatttttgaacaccgagtcctagaaaggttatgtgacttatttgagaccatgtagctttctatttaaatataaaagtgattccaaaataaacagtaggggttttaaccttttggtgaagctcaagtgatttttatgtggataatatcctaatattaaaatggggatttattttcttttaaaaaaactatatgagtttttgctttggtttttgccctttttgagaactagatgctgtgttttaaaattactttctagaaccttctctgctgtggaacatttacagttgtgtaatatagcaaaacatgtttatgttgtttcagaattagttaaaatcctactatttttaatgtcaagtaattttacaggtggtgtacgttatgcattcctattagttttaataaatatgttgtcattttgttaaataagtttaaatttttcatcgcattttacatgtaaacagtaatttactatctacacataaaataccatttacaaataagatatactgtttatatgtaaatggtaaattactatttgaatttgttactgcccagacagtataaaatggtgcacataaagaaaaaagcattttggaaaacaattaagaaatttggctggaaagtgaattttagttaagtgcatcttattcactttaccgaggaaaaaggtaggtttacaaatacaacatatataacaaacctttaatatgggaataatttttgtaatattgataataatacaggtattattttcaaaaaatcaccaaataaaaattatgaaagtaaaaatacagtgcaactcctagcacaaactatcttccacaatatacagttggctgtatctaaatttccagaaatctggttcattttgtattaatctctaatcatgttgcttctaaatatgtatctgaggagtaaacatttcagatttattttcatttgtataaggtaaatgaatgtttagtctttttccagacgtatttgctatgtaatgacagtcattattagtcgtcagtataaatgtgaatagcaaaaaggagaaaattaaataaagctagagcttggctttccgactccttgctcaaaaatggacactttgtccaatcaatttcctatcacaagatgacgattaatagattgttctaatagttaccattcagtcctgcccttaacgtgatgttttttcaaccaaataatagaatcttcactggcattgttaccatattgactggtatttatggaaccccggaaaaaaaaatgctgtaaaatatatagtaggaagtataataatcattataggaaatcatttctctagctggaagtcttagcagggaccagatagttccactggagcttttatgtgctcatgattttctcccttgaagtgtatttgtaacacagttcacacagtttttaattttataaatctgtgtgctaaaacgctattatataagaaaacgggccgggtgtggtggctcacgcctgtaatcccagcactttgggaggcccaggcgggcagatcacaaggtcaggagatcgagaccatcccagccaacatggcaaaactccgtctctattaaaaatacaaaaattagctgagcgtggtggcatgtgtctgtaatcccagctatttgggaggctgaggcaggagaatcacttgaaccagggagtaggaggttgcagtgagccaagatcatgccgctatactccagcctggcgacagagcaagactctatctcaaaaaaaaaaaaaaaaaaaaaagggtgttcacctatttattgggcatatagtctgatagttcccagaaacccattatcttgaatgttttctttatgtaagttcctggaaatccattatttggatgttttctttatgtagttaataattacagcaaagctgtaattaaattatttattcaagagctatctattaaaggactactatgtgccacattctgttctaagcatatcataatcacttcccacccttcccttatttaaaggacatgcataattttatagggcttggcattataaatattcatatctctaatttatagttgctaaacagtttgaagctgagggttgggggaagggagtagtaatttaaagtttataacataagcatccttgactttgcctcctataatttcacactgacatgaggtttattactaggttgtgtgtcatgagtacatctcaatttgctctgactgttctggtttttgcctgttatcctatcataatttttaatagctccctctttcattgtcataagtattccactttagaagataaaatatatagagagggtcactctagttatgagaacaaacatcaggcttttagagctaggcttggtccagtgctcaataactattattatcatgattgcttttgttcttagtagcatcatcgtccttgtcatcatcatctaccttcctaatactttagttcagctgagaatttcggcctatccaagaaatctgattgccattattaccgaattaatcactctttaatgacaatagtatataagaatacgtgacatttaactttccaaattattgaaatgttacgctgtgtatggaaaattctttctaaccgtgttttttctctactctcaaatcgtaacaatcgtcaacacagaagaagacttttatgaccaaatttgtggaatttttttccccatacaccaaacagcaggcaccagctgggtgtctctaattcagtcctgacactatccacccagagatagtgtcagatcccatagattgagggctcagtaccgaggtctgcctcctctgcacccccctagcgcacgcgcgcgcacacacacacacacacacacacacacacaccagtctcaagtccaggcctctggaacttctgacccatgggcttcaagttggggttcccatgaccctctctttgggttcaactaacttgctggagcagctcacagaactcaggaaaacactcgctttcacctgtttatgataaaggatattgcaaaggacacagatgaagagatgcatagggtgaggtatggttggggtggagggacggaaaggggcatggagcttccatgccctccctgagtgcaccaccctctaggaatccccacctgttcagctacccggaagctcactggactctgtcctctttgttttttatggaagcttcatgacatcagcattccttccccaagggtatatggtgggaccctctaacaggaggtttttaagacctataatctgaaaggcgagggaacattaaagtgaaaggagagcaggagaaggtcagaggcctgcccctgagacccaacgcaaccaacattataacaaaaaactgtaacaagggctatgggtgttatgagccaggaacctggatagaaaccagtatgtactataataccatataggcaatgccaagaatatggatcagacactttacaaacaaggaaaaagtaaacaggagtgatgaggaggtaatttactgcaggcattaatgatgagattatgaattatggattccacttgctaccagctatgtgatcttatacctactctgtccatacctaagttataacatccataaaattcaaatactaaaagaagacacttccccaggttgtggtgaaaattcaatgaggtagtaaatgggaaatgtgtaacacagtatctggcatattgtaattgctcaaaaaatgttagattaaaaacagtaggagtaatactaaaatagaaaaatgcaaagagcaagcacaaaatcatctctgattctcacctccaaattctccaaaagtctcaccttcttaatcaaagttgtaaatatggctcttggggagaaagctgaactatgtgctactattatgaatgcaacaggtgaaggagaggagagttagaggcagcaagacaaccaaatggctctcgtggaaggcacagaggattttcagccactgctctcctattccgctgatattactttcattttctatgaccaactagcatttcagctaaaatgtgttggaaaatgatagatttttctcctcctattgcctaagaagcccaacaaagccagcattgttttcaaacaccagcattctcacttttaaagtatgaacataattcagaggacttttaattctgaacatcgtttttatcaatctattggcctgattgtaacccagaaatccaagcagaaagcaagtaaactttcacactgcttccccatcccttccccctacctttatttttgacatcagtttccctcattttggcaaagtaaaggaaaagcatttgtagaaggttacactgaagctagataattttctattaggaaacctcaccaaatacaagataatttgttcattccaatataataatgttttaaaaaatataacaaaaatccagcataaattgtgaagcactgatacttgtgtaacaactaatttccatagtgaaacttcattgttgccactatctacatactgaaaatgtatatcaagcatgtaaatgtgtcacttaagtatgctgtgccctagattttatttaaaagttaagctaattttcaactaaaaacaaattcgactattcttagcaatctctcctccccgttcatgatggatttaaaatgatgaagagtataaatgatgatgaaaagagaaaggaggagaaaaatttcataactctgcatcttcagtgtagcatttttaagtaactcctttattagcacaaaggtgtttgcctgaagcaatgacttctagaaaggagaagaaatgacataataaaaggggattttgctaatataaaatgttttttctttccttttgtttctgcaatgcttttacttacatagcaccaaccctgagactagagggagtttccttcctttctaataatttaataatcgtgaaatgatattaaatggaagttttcatatgccaactccttaaactgaggttaaataaggaacaaagattaaaggccatatttaagaccacatattgtaaattctaacccagtttcatttattatatcacctgcaaagccaatatgccatacaaaagtaaaataacagggtgatttttattaaagatcagaatcataccaaaaatgaacttttctgtcaaatctttatactcatacatcaagatgtgagtttatttatgtagctaaaataacttaatactaaatgctgactactatattcatgtcagctgacccctagtgcttcaaaccatagaaaagggataccaaatgctgggttggttgtgtattccatttttgccgtataccacctgccaaggcttataacagatctgtaatgggtttcttaccttttattgtgtagaaaatggattgttggattaggcctggggccagtgaaccatggaaccccaggtttgcaagaaagagtttatcaccctttgatgttatttctgtctcgtgtcagctgagaaggatgagctagattatctgaaagtaagctggatgccaaaatcagcattcccctcatttatccaccttatggttcggggcaagaccactgtatgggtaacaaaagggctgataagggcctgatggagaaatttggtttttctcccttttgattggcttgctgatattagaaccaattacaagacattgacgagagcatttcattgtttgttgctagagaaaatccatcaattttgttgtggaaatgaaagcatttgagctgaatgttgcacttataatttgtgaacattttcagttatcaccgggacaagtatagtccatctttggcatggttggccaagtgtggtgggaaaagagatggaccagcaaatgggccggaaaccaaagtcatcaaaagggtatttcaagaaaactctatttgttctgatggttacattctgcaggcaacctgtgactgatgactgatgcttatacctcaaatgcagtctaaaaatatttttttgtgaaagtgacacattctgactgtgatgtgggtgacatcaacagttttgaataggacagtacttcttggacttattgaaacttttataaaagaatgaacattctgaactcaattgcaatgtaaatgactatcatgaagattgcttctgttggtgctatgacttttgtgacaaattttagaccattgcagttatctcctagaggttgctttattgttttattttcatcagtgatgtgtattttatcagtgatgttagaatcactgagctgctggttaaggaagagaaaaaaattaatattcaggtgctatataggcccttattcattgagaacaaataaaggccaacacacaaaacaggaaaattaatagaaaagacactctatgggtaagatttcatatagtttgggagcagacaaaaactattttaattactaaaataattaagaaagatgttgaggctgggcacggtggctcacgcctgtaatcccagcactttgggaggccaaggagggcaggccacttgaggtcagagttcaagaccagcctggccaacattgtcaaaccctgtctctactaaaaatacaaaaattagctgggcgtggtggcacatgacttgaatcacagctacttgggaggctgaggcaggagaatcatttgaacccaggaggcggaggttgcagtgaaaggagatcacgccactgcattccagcctgggcaaccgagtgagactctgtctcaaacaaacaaaaaaaaaaagattaaaaaaaaagatgttgacattaacatgttcaagtctttatgctgaaactagaatgcagtatgattaaataatcatttctacttcgggtgaaggattagttttcttaaagatacccctttccagcttctcagttcgcgtgtggttaattcccaacgtggcctcaaatattctaatggtttgtgtaatgagtgccaccgttccaccttcttattctccatgcctcatctcagtcctggaaagatcactaaacttgcagttcataactcagtctagacccaggttcaacactcactaactcataactgtgggccacttatttaaatctcttagtgcctctagttcctcatttgtccaacagtgatgcattatgaagcatgtttgcccatctcccagcgtctagtgaggaactaaaaacacaatatatactatcatactttattacgaggagttaaattgtggttactattacaaagtaggttaccataaaattctaatagcagtggtaaggggtaaagatccacgtgccatcacgtagagcagaacttctcaaactttaatgtacggcaggtccttgaataatgttgtttcattgagcatcactgtgttataatattggcaagggaaaaaactgtatctcagctaggggggcactgtctatgtggggttttcttttgtctctgtgggttttcttctagtactctggtttcctcacatgtcccaaactgtgcacgttaggggaattggtgtgtctacattgtccccatgtgagtgtttatgtgtctacgactgtgccctgcgatagaatggcatccctgccagtgttggctcctgtctggtgctctgagttgccaggatgggctctggcctcccaagtccctgaactggaatacgtggcttggaaaatgaatgactgaattaatataaattactgtgaaataaaaattcatatagtattcaataatcataaagatgcgtgacaataattgatgctctacagaagtgctcagtgagctgccatattgattattgtttgtttttgaactttgtggtgagagaaggcaatcctggcagtttatgctttgcaaacatttattccttgaatgaaccaccgccactgcaaacactgtcactcactgattcaccaaaaactgggtaaataattttcctcctggtttttattaatctttctaaagtggatgtatatctcacatttatttctgagtttaatattagaagtgcttggggtctttatttagatgttggatcatgttttgtgaacacaggtatgcagtaggaacttaattcttgtttatcaattagcctatggtaagattggtttcattatatgtcattttgcctaagtcacagtttcccagaatctatcaacaacattaattgatgacttactgaaacaggaatcaccttgagatcttgttaaaatcaggttactgattcaatggctcttgcataggacctgaggttctgcatttccccccctaatttcaagatgctggttccctggtccccttgctctacttcttaaatggtagggaggtagagagtggctatcaagagtctgtgtaggagttgaccaccaatcccattcaatggaatgcatacagtgtgttctgagatactggaaaggcctttgcaaaaagattttgtctcttgatatttatgaagcacattcatccgaccacagaagatacatatcaactttgacagaaaatatgaacacattcaaatgatttatacctttgaaacatagatcgttgtggggttcataacccaagtataactttcccacagattcactcaatttccttcctctttctgtgcaatatattgtatattgcaagaagctcacctccactcaccttattcctcaggctttcttctcaactatcttctgtatagatttaaccagtgggaggcgttggcaggagattggagagcaggagaaggggagatttcagggtatttctttccctctttcactgctttgggcaacagctgatacagagtaagtggccaaaaaatactagctattattaggtcttctaataatgatcttctaaaatcactttttcagtggttacccccattgatttgccatgaatgtctcttcagacatctttgcaaagaattgagcctgactttagatactcattcaaaatcaaaatcagtaattttaggattgaggactctggtattatttaagaactcttaactgtaccaagcctcactcccatttctggctttcccctatatatcagttaagtaataactccaatagtgtaaaatttgcaatagtgttatgtaacaaatcaccctaaaacttattgacttaaaattatcaccatttataattgcacacagtctgtggggtcccgtgagctgttgtgttgttctggctcactcatacattttcagtcagctaatgggtgggctaggggctggcttatctagcataagcgcagctaggatgattcacctctgctccatatggtctctcatccttcggcaagcgctcctgggcttattctcatgcaagaaacaggattctaatagagaaggaaacaagacttcttgaagcttaagcttggagctggctcactcatttctaacacatttttttaaccaaagcaaatcacaaggcaggcccatattcagggattagggaaataggttacaactcctgatggtagcaactttaaaagtcacattgcaaaaagatgtgcatacagagaggtcaccagtgcaatctaccacaccttgcaatctattaagtttctcaccccctcacaagtaaggtattcagttaagatgcattcctatgtattcagatttctaatcaactaatcctgattctcacgtaatattgacacagtatcaatattctcaaaagccaatagtctagagggtcacaaagatcctcaaagatactttatgcaaaatcctaggagtatagaaacagtaccttggtttatgtatacattcagtatttattaagtgtttccaatatggtataatgttaaggaatgaggatagagttatgaacagacagacacttgtctttatggatcttacatttggagggggacaaacattaaaatggattatataattacaaatgcagccgttctcattgtcttttcagatttctcagggtgtagactgagctactataataaaaataccccaagtttccatgtttcaaacaatatagatatgtgtatctttcccacataaagtccagcctaggtacgtagtctctgctctaaaaaggaacacaggctagcaaggcagctatactattctcaatataatactgcatttcaaaatctccatgctggtcccacaaatatccatgcactctctttcttatcatcaagagaacacacagtgccttcccaagagagaccagtcaaagtctcattcacttactgcatccagctaaaagtccattgtctgtggatgatgcactgtcttctccatcagatcaagatatggttcctcatggtccagtgacctataaagtgaaagttatgctatctgctcctaccacaaccaattctctctttttaaaatttttttaaatttttgtgggtacatagtaggtgtatgtatttatggggtacttgagatgttttgacacaagcatgcaatgcataataatcacatcatggagaacgggggatccaccccctccagcattaatcttttgtgttacaaacaatccaattatactcttatttatttttaaatgtgcagttacattattttgacgatagtcaccctgttgtgctatcgaatactgggtattattcatttttcctaagtattttttgtacccattaaccatcccgctgccccctccccgactcctccactatccttcccagcctctggcaactacctttctactctctatgtccatgagttccattgttttgatttttagattctgcaaataagtgagaacatgagatgtttttctgtgcttggcttattttgcttaagataatgacctccatttccatccatgttgttgcaaatgacaggatctcaatcttttctatggcagaatagtactccatttgtgtatatgtaccacgttttctttatccattcatttgttgatggacacttaaattttttccaaaccttggctattgtgaatagagctgcaataaacatgggaatgcagatatttcgtcaatatactgatttcctttctttgggtatatacccagcagtgggattgctggatcatagggaagctctatttttacttttttgaggaacctccaaactgttctctatagtggttgtactaatttatattcctaccaacagtgtgcaaggttttccttttctccacattctctccagcccaggcacaaagacagcagtaagtgctggacgaccacctatgcaagacctagactataaatccagtacttctctccctctccacacccccatacccaccactccattctgagttttcaaatgtaagctaagctaaatgattcaataaagctttttgaagtcaaggatgagaaaaatcgttgctttttatgtaatcccaccatcaaagtaataattgcttagttcaaattgtggtgatgcaaacaaggaaagcaagagagcataaaacgggtggatctgacgcagtccagaagtggaggcaatggttgtttttagataattattagagaagatactgtgatttggtttgaaggcaaagctcactgaagttctctagttctagatacacctatcgaaaaattcttacccaaataaatgtctcagtgataagagcagcctttccccaaatgcctaagtgtttttgttttgtttttgttttgttttgttttgttttgttttgtttttgtttttgttttttttcaaaatcttcctctggaatggatgctgaccttgtcattgacttattcttcaccacaactcagtcatattaatcttgaaagagacagagaggccactatctctgctaataatttacataattgtttttctacaatttggtgctaattaaaatgtgaaaggggtagtgatgatataggtaaatgtaataaggtcattctttgttcctgagagcaaagataatgtcaccagaaaggattgtctgtatattcacataagagcaggaaacaggaagagagacacagtaaggtaaaatagcatactagtatatcacgtagtctggtatagccaatgtagaatatttatttcaaaaaacaaataaagataaagttctgcttcactttgagaagctgttttttttaatcctgtatagttagttcgacatgttactactctgcctggttcaaattttgatttcactctgttccagttatatatgctatgcaacaaaccactctaaaagttactggcttaaaataagatagttttacgatttctcataattctgagagttgactatgatattcatctgcttcacctgatatcaaccaagacactgggaaagctggaaagtccaaaatggcctcactcacatgactggcagttggtgctgcctaccagctgagaactcagctaaagctattggccatgagcctcagtttgtttccattgtcttctccatgtgtctcctttggcttccccacagcttggtggttgagttctgtgaagaagccttccaaaagaacaagcaccaatcttcaaagacttatcaagcttctgtttgtatcacacttgctactatcccattggccaaagccaggcatatggccaagttcagaatcaaaatgagaagggactacacaaaggcatgaatccaagaggcgtgattaattgtggggctgccaaataatcgccttccacaaattccttactagctgtgtcatctctctgtggtctcagttttctcacctggaaacaggaacaaaaatggccctacaaaaatggactgagatatattaggttggtgcaaaagaaattgcagtttgggaccgtgaattttaaatcattataactaggctcaagcacatctttattaatcaaagtaggaaccgttacagtcaacacatttttgccaagaagaaataagtgtgtttattcctgtagcataaaaattcatgctttgggattcaatgaactcttggaaagcattttcttcatcctgctagttgtggaagcattttccctgtaaaaagttgtcgagatgcttgaagaagtggtagtcagttggttgagaggtcaggtaaatatggcagatgaggcaaaacttcctagcccgattcattcaacttgtgaagcgttggttgtgcgacgtgcggtcgggcgttgtcacagagaagaattgggccctttctgttgaccactgctggctgcaggcatggcagtttttgatgtatctcatcaatttactgagcatacttctcaaatgtagtggtttcgccgggattcagaaagcggtagtgggtcaggccagcaggagaccagtgaacagtgaccatgacttttggtacaagtttggctttggaaagtgctttggagcttcttctcagtccagccactgaactgggcatcgccagttgtcgtttaaaatccactttttgttgcacgttacaatccgatcaagaaatggtttgttgttgttggcgtagaataagagaagatggcacttcaaaatgacgatacttttattttcgctctgcttatgaggcacccacttatcgagttttttcgcctttccaatttgcttcaaatgctgaacaactgtgaaatggttgacattgagttcctcggcaacttctcgtgtagttgtaagaggatcagcttcgatgattggtctcaatcggtcattgtcaacttctgatggccagccactacgcccctcatcttcaagactcttatctcctttgaaaaacttcttgaaccaccactgcactgtgcgtttgttagcagtaacttggccaaatgtgtttttgacattgcgagttgcctctgcttctttacaatccattttgaactcgaataagaaaaacgctcgaatttgctttttgtctaacatcatttccatagtctaaaataaacataaaataaacagcaagtaataagtcattagcaaaaaaaaaaaaagtgagaaatgctcattaaaatgatgtataacataatcacatttatttaagaatgtatttcaatatcaaatggcaagttccatgaatgtgaaaacaacacttacttttgtagtcacctaatgacacatttaagaagctgaaacctgagctcagcacatggtaagacatcagtaagtattagttatcataatttttttagtaattttcctacagagctataaataaaatgaaatactttccaaacagtgataaaactataaagcagcaatacattataagcttctatcctaatctgccttcccctcagggccttaaaatgtgtcatttctgtaaatgttacctctgacatgaaagcaccaacacactgttcagcaattacaagttgattgtgacaagagcctcactctccctatttctttttctcttcctgtcttgctttcccttttccccatcctttcactcactttgataaggcaaactgccatgtagtcacaaaatcctagacaaacaagtctgtacctatgtgggcgatgctgtggatttagtaagggaaacagttccttgataaatttctcctttagccctgggtttccaacccctgtgtcattcagctatagaaatcttctgatattttctcccactggtcattttcactcaggctgccatcaaaatgagactacccaatgttctttccatttgttctgttttcttcctcgcctctgattccctgcctggtccacttagaaagtctaccttttttccttctctcttaataccaccaatctctaaatctgacttctcctttctaatcccatagagcctgccttgtcatctccaaacaagatccatcttggcctcctgttatcctcagcccacagcagtatttcacttacaacgttcgttagtttctacctcagatgtgtcaggcatttagtttgtaccaatattttatttctttttatatctacaccaagcctgcactagacggtccaaggagaaatttaactgattcctgttttgaagtcctccccactccttgggagagttaaagattcctcagtgtgttaggtaatgatagttaatatttattaataacttactgtgtatcgactgtattctaagtgctttgcactgttagaaggagaataacctaagactgtgccaaacagcagtctagaacaaagctgaattccttgcttgcctggcaagggagaatgtggtacatactaaaggattaatacatgttcactattaaattgattgattgtggtggtggtgacagtggtgatgacttttcaagtgtgggtaaagtaattttttccaacaaatccacatccacatatttaagaaaagagagacatttcattctatctttttgtgtgcctttgagaggacacccctggcacccaactcccaggcaaatgccaccatctgtgtgattttccttcatttgccaacgaaggcacagcaggtactactaggttaacctttgctttcgcaagtcttctctcaaaatagtaaacacttcagctgttggaaagctctaatctcaaactgcaaatttaaaaatctctctctggagttcaaaaaatagaaagaaaaaataaaaatctctctcttctggaacataatgtttgaactgttacatattattcacactatttcacattatgggattatgaaatatggttttaggtgttagaaaaacgaaagaaaactattatttgttaacactaaccgagagatttttatgatattcaagtaaaatgatagaatgaattattttaaaaatgcatgaatcttcaccttctgtgaagtgtcatggaggattagttctaactaatatgcctgtaagtaactgacttaatgcgtctattggttctcttaatgctgtaagtgacagaaaactggtctcaaactgatttaaacaataaatatgatcaaggttccggttttttgtttcttgttttttttttttttttttcacatttctctgggttctatttttctgtgttgacctagcagcttcacctgacttccctcttggtgacaaaaatggcctgaagccgtttcagaacccacatctgcaaacttacttttgatgaaaatcatctctttagggaccttctttcccaaagcatccaggaaagactgctctgaaactgactggcctgaattaggtcacatgctcattcctgtactaaatcacacctcacttctacagctaaaagtcattaaatctcaaccaaactctacagctgcaccacaacaaaggtagagaagtaggtgcaaagttcctcaaaggaacgtaagggtgaaagatgattgactgataaacagacaggtagacagaatagatagatgaattaggaaaagataaccaaccaatatctgtcacattgctttgacttgattttttagtcaattaatgaaactgaatggtaattttgacattacaacaatactttccaaatgtaggcaggttgtggagatcatttaaggaaaaaatgtatgaggtgttgtagcagatactgtcggtgccccaccgatatccctttagcacttaccatttttatacgtgcttcttaatttccaacttcctgtacttgcatctctttgcttggggctatctctgctcattcttgggagagagcagaaatgtagcagttatgcccctgtagagcagcagttgatagatcaataccctgtcccccttgcccttcagatctaataactccaagcttaattccctacatctttcatataagtatatatataagtatatatatatacttgaagttctagggtacatgtgcacaacgtgcaggtttgttacataggtatgcgtgggccatgctggtgtgctgcacccattaactcgtcatttacattagctatttctcctaatgctatccctccccagccccccaccccacgacaggccccagtgtgtgatgttgcctgcgctgtgtccaagtgttttcattgttcaattcccacctatgagtgaggacatgcggtgtttggttttctgtccttgtgatagtttgctcagaatgttggtttccagcttcatccatgtcccttcaaaggacataaacaactcatccttttttatggttgcgtagtattccatggtgtgtatgtgccacattttcttaatccagtctatcactgatggacatttgggttggttccaagtctttgctattgtgaatagtgccgcaataaacatacgtgtgcatgtgtctttatagcagcatgatttataatcctttgggtatatacccagtaatgggatggccgggtcaaatggtatttctagttctagatccttgaggaatcgccacactgtcttccacaatggttgaactagtttacagtcccaccaacggtgtgaaagtgttcctgtttctccacatcctctccagcatctgttgtttcctgactttttaatgatcaccattctaactggagtgagatggtatctcattgtggttttgatttgcatttctctgatgaccagtgatgatgagcattttttcatgtgtctgttagctgcataaatgtcttcttttgagaagtgtctgttcctatccttggccgacttttcgatgaggttggtttttttcttgtaaatttgtttaagttctttgtagattctcgatattagccctttgtcagatgggtagattgcaaaaattttctcccattatgtaggttgcttgttcactctgatggtactttcttttgctgtgcagaagctctttcgtttaattagatcccatttgtcaattttggcttctgttgccattgcttttggtgttttcatcatgaagtccttgcccatgcctttgtcctgaatggtattgcctaggttttcttctagggttttatggttttaggtctaacatgtaagtctttaatccatcttgaattaattaatttttgtataaggtgtaaggaagggatccagtttcagctttctacatatggctagccagttttcccagcaccatttattaaatagggaatcctttccccatttcttgttttttgtcaggtttgtcaaagatcagatagttgtagatgtgtggtattatttctgaggcttccgttctgttccattggtctatatctctgttttggtaccagtaccatgctgttttggttacagtagccttagtttcctacatcttcttttagggataacagggagtattaagattcagttgttcacattgatgacttgcatgataatataccctttattggctatcttccctatttcacttcttctcaccctgttgatgtgtcctggaatcacatcccaaaactacttgagctcaaatttttatttctgggtttgctactgggagacccaaatcaagacagttggcttcagtactcaggtacttacaaggagatcatggatatcaattgaatcagaattccatgtcatagcttttcaaatttatatcacaataagttgaaaagatgttgattcttccttccacagtattttctgtttctgtgtgtcttacattctggtgtctcaaaacatggctgcaaccagggaaggaattgaaatttggagtaaatgtcctattttagtaggtctacatttaagacatggacctgaaattgagatcataaacaaaagtagatgtgagcataaagtagaaggtgaggttggagggggaaattgtttggatttactgtaaccaatggagctgcttagtctagtcaaggaatttcaatcatttctgtggagactagatgacttatgttatacaaggatatctctggaaaattcactgtacagttttactaaatctggctgataatatgttcactcaatgttatgatgtcaataatagaatggatattgcctttaaagacaattttaaagtaaatatctcacatattcctactcatttatcaagggctgtgtcattcatggcaatataagataattcttttcactttcaaaatcttccagatgcagaaactttccaatatttgctgtagatgaaagtgtacaatttcacaattcaatgggacaaaaagaattaggaaaaatatgtttcagagagtttatttggtatcatctacaagacctggtatgagacctggttggtgttgtatggaatgaaatatatcagtctgttctcacactgctaataaagacatacctgagactgggtaatttataaaggaaagtgatttaattgactcacagttcagcatggctggggaggcctcaggaaacttacaatcatggcagatggggaagcaaacaccttcttcttcacatggcagcaggaaggaggagaatgagcaaaagagggaaaagccccttataaaaccatcagacctcgtgagaactcactgtcacaagaacagcatgagggtaaccgcccgccgtgattcaattatctccacctgatccctcccaggacgtgtgggggttatgggaacaacagcttaagatgagcttttggtacagacacagccaaaccatatcatagagtttcgaatctgaaaaacaaaagaagctaatttagtttcagaaagctgagatttcatgaaccatttaaaaattcactttataatttttcatgcattttgaagcctttatcctttaaatggaaatggaatagaactattattcgtcatttctaaactgtgcattcatcaacaattttcagaagttaattccaacatgtcttcatcaactctatattacatgttagtacactacatctctattttcatgctataattttttactttttcctcacactttcatctcaccctctcaagatgtgttaatcccctttgctcttttccccatctcgtctctgttgcctttctccccccttcctttttttttaatttctgttctcttttacctgaaatctccctcttcatcttttgctaccaattatgttcttaattggttgaagtgagcaaggtaggaaattctccattttgattccattctctcacatggtttatctttaatatgttttaataaacagtttaacataaatcttacttccaatttaacatgtaaaatttagaaaattggtgaaaaatatgcctgctttttcacccccaaagaaccaagtttaaaaagttttgtgactttgaggcatccttttccctaaaagcaagcttaacagattcttagcattcgtctctgtgtgaaattgtggaaactttaaaaaaactatttgaagtaccaacaactcaaagataaattgtctgttttaaatgcaaggtgctaaaataaaactagaagattgacaatattattcatctttatcactgttctacttaaaatttgaaaattaatgttagaaatgtgagagggtgcatgaaaccttaatggttttatcatttcatctgagtatatatttgatttcttctttctgacattgaaactttaaaattcgccactatttttcagtaactcgttaaaatatggtccgttcttatatttgcaatactcctatactgaaaaccctacaacttcaccattatttaatttttatgttactatatttgtttcttaaaaagattataatattatgtattagttgtctattgctgcataacaattactacaaagataggggcttaaaactgtatctttagagtatcaggatacatatgggtcagaagtctaggcatagattatccatattctttgcttcggggtctctcacaaaggctgcacactaggtgttggccagggctagggtctcatttgaaagcttgccttggaaggacctgcttccaaactcacctgttgttggtaagtttcagttccatgtgggttattggactgtagtcttccttttcttgttggctgatggccacgtttagttccttcggtctctaacatggcaatttgcctcatcaaaatcagtgagagaaagtgggggaggggggaaagagacagagaaagagtgaaattgctagcaagacaaaagtcccaatcttatgtagcctaattggagaagtgatatccttttgtctttgacatattctgcttgtcagaagcaagtcaaaagtcttgaccactctcaaggggaggaaattattaaaggactcaaatactaggagacagagatcactgagtgccattttagagtcttcccaccacggattatttcccttcacctgctggcatttgaaaatgcagctaatactctgggattctccaaacctaatttttttgtataattagagaagtatttgtcataatctgttaagtgtagtaatatattaagaaattgaatttattccttcatatttcaaaaagtacatggggttgggggacagctatgttgtcataaactttaatacatacatgattggaatggattatgaaatatttttctctaagagatagtataaggctgcaaccactgaggctcccaaatacagatgattcatatgtatttagttttaatgcaaagcttctcatgctgatttaaactctcatattttcatatatggtgttttattttttatataatgaatgtctataaaattcctattattttttcaaaagtattgtggcaaatatttcctagtaaaatctaaagatatctttgacgtaatttttatgctctcatttatgttaagaactcaatattgaagtaatgttctttcttatttcctagtaactaaaatccttactatattcatgaagagctgtgcctctattaaaaagcttttattgcaaacagaaatgtcaaaatacagcaaaggtagagctatgtatgattcttcatctgtaatgtaattttaagtatacattttattgcataagcagagatttatacccacatttgctttcagtattcacagaagaattttcatatgtatttcttaaaataacaaaatggctgctttggtgtggggatagtatggtacagcatttattgtgaaaatgattcttatcttccatctttttcaaatggtgagttcagtatgtttaacattgctggttttataatattgcgaatatttttgagaggaagaaacaataagagactgataagaataattcatatttgctcaaagtttaatcagttttttatttgaacaaaaacttggacgaaatgtccaactttcctttgagatcagtgctctccaatgtggtaacaacagcctaccatatgagcatttgaaatatggctagtccccactgaaatgtgctgtaagtataaaacactcaccaaattacaaaacctaagtatgaaaaaaataaaatatctcattggtactttttatattgagtacaggttgaagtgacaacaatttggctatttaagttaaagaaaatataacattaaaattaatttgacctgttttttacttttgtaatgtgtagaaaattttaaattacatgtatcgctctcattataattttattggatgtcattgttctagataaacaatggcaatgttgagaggtgtcataatagggacaattgtctctgtgaagaagaaattatatgaaccctacaacatgtattagccgcagagttgcttagaattgacttactctgtcttgttgaaaataggttttcccttaaaatctctgcctgatgtagccaaccacgattcaatgagcaaacaaaaatcttaaaggggaaaaaatcattttttgagtctattttacacacccagtatcaaaaagaaaaatataaatccacaactaggattatacgggatgtaattcttggatttcttttggtcttataatgctttatacctaggagatgttcaacaaattattattgaatgattgtagtttaaccgtcagttacattttgcagcaatacatttattagtagcaaaatctgagtgtttactaattttcatcacctaatcagcaaattagtactgctcttatatcgctttgcctacgctctactcactggttcaatcagctaattttttcagaattttatggtttataaaccactatatgttgcacagtatttcctatacattagctcatttgagtcacagaagttataggaggtggatcttgtctttctttgttcagaaagagaaatccaggttcagcgaggttaactggccttgtttaagatcagcacgttgctaggtgacagaaggtgttcacttctcactgaactttgcatatcaaaagagatttaaagaattcactttggagagcgggagttatggggtgaatattttatcatgttgtccgtcttaataatcaccaatttgatactaaggctgctagtcatctctaacgaagagaagttactttgaagttggttgattgattgttgttgattgacagaagtattagttttcagaatgaactaattcattaaagaaataaaacattgggtttgttcattccataaataattgaacatttattatgtgtatgataccagcctaagcagatacctaaaaggaatggagattactatagttaataacaatgcattgtattcttgaaaattgccaagagattacattttaaacattctcaccataaaaaaatgataagaatgtggggtaatgcatatgttaattatctcaatttagccattccacagtgtatgcatatttcaaaacatgttgtacacaataaatacatacaatgttatgtgttaatttaaaaataaatacattagaaacggtaaaagtcactaggatcatggaaataaaaatgtttacatttatgtaaatattagtaatataatagagggcatatccaaaatatagtgtcatattaataagatgttgtatgattattatagactacaaaataataaaggaatagacagaatgtttctaaataaagaatagaaattacagtgaagcggaagagagagtaaccctaaacccttcataatcctccctttgcctcgtagtatagcttggaaagtaattatgtggaaagttgagattgcaacaaaggacggtagtacaggagttgcccaaggacagacaattattttctcaaataaactatagcagaagcaaaatggccttggaccacaaaagaaggccctcatgtagacattgttctattctgaagtagaatttgcagtactcaagagaagaggaaagattattataggtggagagactgtaaacaaaatattatggtaggattcctcctgaatagagcaaggtgattgtgtttgacattgaaaaggtatgtttgggcaagagtttgaaaacctttagccaccatgctaagagatcttaaatctttatctctgagtaagggcggtggttgtggttaatgatccttgagcacaactctgtcccattaaagacagtagattcaactgcttctagcattagtccatatcagggagtaaagtgatccgatacattattttcccccagtaaatggttcataaaggaaggccttggctctgccttgtatgtctacatgggagaatataccagaatgtctagaggagcatgggtagcgtaacctttccccatatgcacatacaacaaatactgataatccactcacaggggagggactcatttttaagaattaagttttattttagaagactcagtctgatggcaatgcaggggttgaattacagcaggtagagactggaggtctacaaactggtttgagatatatattttttccggtggcccagataataaggacttgaacagacttcttgctctgggaatgtaaaaggccaggctggatgtaagaggttaggaagttccaaactgtcccacattttcctttcttctgagccctccaaactgtaccagactctgcatgttacgcacttccaaagtcgcttccacattttcgggtgtcttttcagcagtgccccactctactggtaccaaattactgtattagtccattttcacactgcggataaagacatacccgagactgggcaatttacaaaagaaagaggtttaatggacttacggttccacttggctggggagacctcacaactatggcaccaggcaaggaggaacgagtcacatcttacgtggatgggcagcagtcaaagagagagcttttggagggaaactccgcttttcaaaaccatcagatctcatgagacttattcacaatcactagaacagcacaggaaagacctgcccccatgattaaattacctcccactgggtccctcccataacacatgggaattcaacatgagatttgggtggagacacagccaaaccgtatcagtgatgcaaaataaaagaagactgtggagtaaattacacatggagaaaaggaagaggaactaggaagtatagatactgtgagaattaactctctgttctacaaaagaagaaatgggcttaaagtggttccccccaaaactaaaatccaaaggcacataagtcataatgcacactgttacaccgagtccttccagctcttaacttacttgttttactgcactacacttgacttgagttttagacttagtaaatctgaggtaaatgcagattgagaatgagaacaaaatgttaaaaagagaagcagtctcattttcttactactaataggcattgcagtttgtgtgggctctagcagggatgtttgtaccactgggatctaagcatctatttctatattataaatagaaaaattaggttgagctatcgcgactccattacaaacttatggaattagattctctggtatggagcttggatatacatattaaaacaaaataaaacaaaaactcctacccaattgattctgctgtgtgctctagttaagactgttatggttaagaaaataaataatcgctgtatggaatgtatatcgtcctattttaaattaataaaaaaaattttgcaggccttcccaccttccaactcctagagacaacaaatccagatttgaaaatcagtcatattaaatagttgtatcgatatttaccctttgtttctacgttattattttcttcaattttcacacgtatttgttcatcagttggttatgatggacttcactttttttcagtcttacgaatgagatttctccctccaaaaatcaataggcacctgctgattttatttattccaacatgaagttgcagaaaatgaatatggccaaaaatggttaaaaaaaaaaaagcctgttcttcaaaagactagatcgtcagttgaagcagaaaattatattcagtgcactggatttatgcattgttttagccttctccaaccaatttagaaatgcattttcttataaaattgagattattacaaatcctgtgctaagcagctgaaataatgtgcctatgccaaggtcatatcttaaaagtttggaggagcacactgcaattgaatataagtttataaatgtattccacatacttttctgatatattttaataatttaatttttacattttacctatattgtcttcattttcactttacctttggtggtgtttcatacatattcattgtttggaagaaattaagcagacagtattctaaagtcaatactgagtctgctaatgaaaatggttaagttaattaactaaatggcaaccttcactgaacttattcaaagctatttcccctcatgatgtgttttcctgaagaaatgatgcataaaaactaaacccctgttattcgctattcttctgtatcagcctctaaattgtcactttacatgttacaacctgttgcatgatgattaattatgacaatttaatggcatgtaaagggtaaaaccctaaaggattactcaaaccatcattccttaagaaaagaaattgtaatgcctaggttatcttctagggtttttatggttttaggtctaacgtttaagtctttaatccatcttgaattgatttttgtataaggtgtaaggaagggatccagtttcagctttctacgtatggctagccaattttcccagcaccgtttattaaatagggaatcctttccccattgcttgtttttctcaggtttgtcaaagatcagatagttgtagatatgcggcgttacttctgagggctctgttctgttccattgatctatatctctgttttggtaccagtaccatgctgttttggttactgtagccttgtagtatagtttgaagtcaggtagtgtgatgcctccagctttgttcttttggctcaggattgacttggcgatgcgggctcttttttggttccatatgaactttaaagtagttttttccaattctgtgaagaaaggcattggtagcttgatggggatggcattgaatctgtaaattaccttgggcagtatgaccattttcacgatattgattcttcctacccatgagcatggaatgttcttccatttgtttgtatcctcttttatttccttgagcagtggtttgtagttctccttgaagaggtccttcacatcccttgtaagttggattcctaggcattttattctcttgaggcattaccattcaggacataggcatgggcaaggacttcatgtctaaaacaccaaaaccaatggcaacaaaagccaaaattgacaaatgggatctaattaaactaaggagcttctgcacagcaaaagaaactaccatcagagtgaacaggcaacctacaaaatgggagaaaattttcgcaacctactcatctgataaagggctaatatccagaatctacaatgaactccaacaaatttacaagaaaaaaacaaacaaccccatcaaaaagtgggcgaaggacatgaacagacacttctcaaaagaagacatttatgcagccaaaaaacacatgaaaaaatgctcaccatcactggccatcagagaaatgcaaatcaaaaccacaatgagataccatctcacaccagttagaatggcaatcattaaaaagtcaggaaacaacaggtgctggagaggatgtggagaaataggaacacttttacactgttggtgggactgtaaactagttcaaccattgtggaagtcggtgtggcgattcctcagggatctagaactagaaataccatttgacccagccatcccattactgggtatatacccaaaggactataaatcatgctgctataaagacacatgcacacgtatgtttattgcggcgctattcacaatagcaaagacttggaaccaacccaaatgtccaacaatgatagactggattaagaaaatgtggcacatatacaccatgcaatactatgcagccataaaaaaggatgagttcatgtcctttgtaggcacatgggtgaaattggaaatcatcgttctcagtaaactgtcgcaagaacaaaaaaccaaacaccgcatgttctcactcataggtgggaattgaacaatgagaacacatggacacaggaaggggaacatcacactctggggactgttgtggggtgggggaaggggggagggatagcattgggagatatacccaatgctagatgacaagttagtgggtgcagcgcgccagcatggcacatgtatacatatgtaactaacctgcacaatgtgcacatgtaccctaaaacttaaagtacaataataaaagaaaaaaaaaagaaaaaagcaaagaaattgtaaaatgttgttctatcagaaactcggctaattatttttaaattttagatcaaaaactcaactagttttaatgtactacttataagtcagataaaatcattttttatttttgttttctttttgtttttacatctgttagaaacgatggggtcttcaaagtaaaagaagagatttgcaatgcctataccaaattagttattttaggatactgaatgaaatggttttctatactcaataaaggtaaaagaataagcagaggtagatctggttttctgaaacttgaagcacattctaatttggcagttttctttaagtcaaagaatataacaggacaaatataaaattaggtatgaacatgattatagaaagaaaggaaatcataacaaattatacgtttttaaaaagatgacagataaccacatacatcacaaaaattgaaaaaaataagcagaatgttttcttaataatgaaccatctctgcaatactagaatatacagtgtctgaaataattttttctatctttctggatgcatcctctttcagcacctcttcatgtgagagcatcagaaaataatttactctttcccccagcattgttgattaaaatttgacttctatcattgatagtttagaaaagtttattttacattttcaacttattattggtgatgtcacataaattattacaatttattgtccaatttaggaagaccctgccaagtttctttcacatatgaactgtaaaatttaaaagatcattcaagttatcttgtacaataactaatacatatttttcttttagtcatactaaaccctgatgctaaggatcacccaaactttttcagggaaagaagtagcttgcaaataaatcaaggaccatttatccttactttttggaagaaatggaaaaggataaagtgttagtttaaatacactcaagaacagaatgtaagacaagaaattggaagcagagaagttcatcctcaaatgtaagagtgaaagaatagggttaatgaaacaggaaaggggaaatccaagaaaaattatgccgcgctttagagaatctcctaagcacagagatattggcaatgtgcagatgaaatagctgtcacaggtcagccatgtcagaggtgattccagccactaagtatctactgcagattagatatttggaaagcagaatgagctctgttcatgccattactggggcttgacttcttaatggtttcaagtccccctttgactctaatccttctaaagtcaactttgtataaactcttttcaaaagtgtttatccctgtagaataagttcaaaactccatgtcatggcacacaaaactcttcaaatcatattcagctggtattgttttcttccacattccagtcataactaggatcccaagaattagcaaataaaaatatgaaacatccagaattctaagcataactatgtcccaaatactacaacaaaaaatactgaaaagtatcgattgcttatacaaaatgtaaatggtatcctgtattttataaggcaaccctagtcataagatctctttcttcttcctcacacactgtcaagcttgagccaacagagtaccttttaatgggctgcgcagaatagctttcgatagtttacccattaattaacagaaaattcaaatgagatatcctctgtgaaatcatccttctctcctgcctcctgtctctccattctttctccaggagacagaggccctccagactccatgactttgtagtgtattgtgtctgtctttattagagtattcatcacttggtaattgaattctgtgtttaaatacattttttttcttccagaataagtgttcatagaagggagggatgatttacctagcatactgcctggcatataaaaggccctaaataatttttcttttaaccagtaaccaactaaccaattcaacagttttttaaatgagtgaaaccactttttaaatttttttttaaattcatgcttcacctgtaaaaatatatagatgaattgcaatctggaactctgagtaatttatataaaagtgatgaaaaagaccatggcttcagatttgttgttttaattccagcttcagttcatacaaacattacaaagtcgcagtatctactgtgtaaaaagtttcatcccaatgaagaaattaaaatgtctgtctaatagagatgctctaatggacagcgatgtgtagacttcagaagaatctcctcacacagccttggaggcataagttgggaacagagcaagttctgtgtttgcctttcaaaggaatgttcctttccctttcattgacaaatattataaagatgccccaaaacttctgtgagtttcccccgggacgtaaggtcctctgcattttcctaacttgtttctcaaagcggtggttcccaaggcctgagaatagctgtgtctcagctctctcctggaaaccagagcctaaaatgttgccacatcatcgggaatgtagctgcatacttagccagagccaagagatgagccccactcgcaaagcccatgggctggacaaaattgttagccatttggtgtaggtcattgcactaggtccattacacaggttatctggcaggagtcccggctttggaggaaagacgtttaaatcctgtaaataaatggctggaacaccatggcagttgattgtgttaagccctcatccaaaattgctttgttaggttctattctattgctcattatcttgctgtgaagaaaattaagcttacatctgcttagggtgacagggtatcctgttgtcacaggattttccacattttaggcctatgtcacaagctcccaataaaccctcagagaagatcttttgtgttcacaggcatccaggtgtcaggcagacacagtctttgtcttcttgaagctcagtgacacgttcagggctgtgtatactcctccattccctgccagagacaaaatgtttgtggaacagtcaagctagaagggacctcagaattaatctgatcaaatgtctgcatttttcagttccaaggatactcagggaaggccctcggattctataagtagcggtagaggtggtattagaagtcaggttgcctgacttccaaacctctgttagttactgtcccttcccctgcatgcagcactagtgtaatccctcaactctcacttccctttttcgccacatgcctctctctctttccttcccttgattaccctgcctatccctcctacaagggaaactaccaccaggcatcctcatctgagacccgggaatggaggccaggtcttttccctccctccctccctttcccctttttttgtgtgacagtaacattattcaagtacagctcttccttttttcagtaccttccccctcagaccagaagttaatgaaaaatagggttgcgtgatatgcagcctgggggccaaaaatgtaggacaagcagtgtgcttcagacaaaactgtagggttctggtttcatgcacaaccttggaggacggtggctagaggccctagtatgagagatcaattaaacatggaggccagaaattaaccacatgggattaacatacgtaaggttgcttcttttcaatgagtctaggaaacacactggggacaccttgttcaagacaagctactatttgatgctccttcatacgcttgcttaaaatatttgttcagcatttatttagtgggggcaagaaaaattgatgttatgttaataagaaaacctctttacctcttaccttttattaaaataatcaacttagaagatatactaaaactcacatgacttttgacatctatggatgatctttcatttaatatttttctgctattcctactatagaataaaagctgctattgcattattacagagcgtaatgtgagccacatatgttattttaatcttaatggccacattaaaatagtaaaaataaacaggtgaaatttatttggattatatgttttatttaacccagtgtatctaaaattgtatcattttgacgttgcaatcagtgcaaaaatacagtcatgctatgtgtaatgaggttttggtccatgataaactatatatacactggtgatctaataggattataatacagtaggtttaccatacctttttctatgtttaggtatgtttagatgcacgagtacttgccactatgttagaatttcctgtagtattcagtacagtcacgtgctgcacaaatttgcagcccaggagcattaggctatatcatgtagcctaggtgtgtagtaggctatatgtaccacctaggtttgtgtaggtacacactatgatgtttgcataaggataaaatcacctaatgacacatctctcagaatgtattcctgtcattaagtgatgcatggatgaattaaaatattttggattctttttttttttcagtactatgccttcggaatccaatatgtattttacagcatatgtctattccaaataggcatattctgggctgggtgctcaatagctacatgtggttagtggctaccatattaaccggtgaagttctatgcccatcaaggctacacgtaatttacagggtataatagtattttaaaaattaatttttttctggcttttatgttgacatatcgtttccattttttaaatttttgttttattttctttcactgctttggaaacgcacaacttcttggaatgcaaattaaaagatatcaaataatgatgtagataatttgttattgctaaatgtctaccacttgaaatattcaagtttcaaatttcagctaactgcgattgcaagcttcagctagctggtcccagatggatggcccagctaaatcagacatttgtacatactggctacaaagtgtcccaaaaacagaccaggagggtcgtggatttaaaaaaatttccaccaaaggatgctgtcttgtccattttccaatttgggtaaattaatggatactgcatttaaaagtttttttatttctcgtacattgaagccctgtactgcactcaccaactcacccgttaaagcggctctgaaatacaggcaggaccaagacttagatggactggaggttgggccacaactccttgaacacctagagcagaggtcagcaaactttctataacggtccagatggtaaatgttttaggctttgcaggccaataggtctctgccacgactacttaacaccgctattgtggatcaaaagcagccctaatacgtaactacacataaacgaatgggcatggctgtgtcccgtgacaatttacttggggacacaaatttgaatttcatataatattcatgtctcacccatttattaattattttcagtttcttcaaatgttaaaacaattgttagttctcaaactgtacaaagacatatggtggctgaatgtgacccataagccatagtttgctgccctctgcccaagtctcctgttgaaatggggttatggcaacaatcctcgcagaatataaaactattttggcacctgacttttgccctgatttttttattgtttccagagaaatcaagtatttttctttttcaaatttatatccatattctctttttttctttgctctcttctcttctggccagcaggaagagaccaacccatctttgaattgtattcactttcctcataccgtcacacagctagtaaagctacaacttcacatatgccaatgccaactcttcccgatgttgtgttcaaaacctttctaagcatcaccattcccaggagtagcaattctatatgatattattattttacttgttggtaaggttaaaagttccagggatactgattttcttctttgttagccatgtttcattgagtggataagcaatatgcatttgcttcatagtataaataacaataatgcatcaaattgcaacaatatgaatattacacatagaaaagataaatgtgagttatgtaggtcatgccatttgatagaaaattttttttatatttatatgtttaaacatgacaataaaatgattccattcagatgaaggcaaaggaataggatttcttttcagtgtggtggttttctatttttgttttgttttgttttgttttttagagaatgagttttggagaaaaacaagctttctagacagaaaatattgaaattaaaaccagcaattcatggtcatattattgaaactatcaaattggtatatatatttgaacactactgattattttctaaaatgttacgctttcaaaaaatcatgaagattggcaagttttttagatgcataagcaaatagtgtagtacggcttgtaacactgttcaagataacttttttataatgagtatggtctttctctgccctgtctaatacaatgtgggttttgagcattggaaatgtggtaagtgcaactaaggaactgatatttaaattgtatttaagtttaatacatttaaatttaaagttacattttgataaattgctttgtttttcttttttctttctttctttcttcttctttttttttttgttttgttttttttgaaacaacaatctcactatgttgcctcccaggctggtatccaactcctgggctcaagcagtcctccttcctcggcctcccaaagtgctaggattataggcaggcaccaccatccccagctaaattgtttcttaaatgaaacttctgaatttgaggatacgtgattatgtggtgtagttttccctttctttccccccctgaaatccatattctgaagtacagtgatttatataaaagtaaaaagaaggagactgttttttttttttaaattctattaagaaaccaaattttaacagacacctcagggcctaaataaatatcaagttattgttatttgttatggttcttgttgcttgggtaaaactgtacagatcatgacttagttttccttgaatttttatcaaacaaatgaacaaaatgagcaaacaaaaatattaaaaatgatatttcctacgaatccaagggacatttttctgtatcagccaggctgatgctaaggtccttcaagcaaataagatcaaagatttctgattggagagtgtgggaataaagtagcccttgtttagtgctactttgtagagcctttgtttagagtacggctgggagggagggagagagggagaaaaatacggggttaatttgtaacaacacattctgtggtgtgcgtgtgtgtgtgtgtgtgtgtgtgtgtgtgtgtgtgagagagagagagagagagagagagagacagagagagagattaaattacatttaacttctttaaattttattgtcctcagggtttaaacagtatgtgaccaaaatcacattatttagtgaagagtttgtgggtaggtggatagttagatgggtataaatccctataaaatccattttagaactattgaggtttgagcaaatcaatgtcacctattcacttcatttgtctaatgcctccaggagccattaaagggcttgttacctaactttagggtaggtttagatcaaggtgaacagtcagaaaatattatccatgtactcacgtatattattaagtattctttgaccatggagttagatgcttatactgcaaacaaataaattaatgaataacagtgctgctcatgaacaccaaagtttactgaaaagtcaatatggttttagtgtggtaataagggcagagttctccaaggactgccaacctatttattgtacatcaaattttactgactttgaaatcttgctagaaatgttcatttacctcgtaatgtattatatgtttgaggtcttgagaaaaataacaaaatccatgtgtggtaatgaagtggttatgcaataaaactaacatacactgtgatttgacacaggggacttcactgttatcagatacttaaaactggaaacaatgtaggaaatatagatgtataagcatcgtaagtaaaatccacatgctttaaaaaggaaatccacttacttttaaagtaatattccgagagctatgccactgggggctgaatgtcataaaaatgatttgtaattagtcacttttacattgtatatggatttatagttttaaaatatctggtggcatataaccacaatgtatttttcagtcatatattcatcattattttattaaatttccagagggaaagaaaataaatgacctcctagtgagggatattttaccacgagaccagttgtaaaaataatcgagttttgtgcctgggaagatatctttgctaagtctagttctccagtgacattaatttattgttgttaagaaatgtgtgaggcaaaatgaactctccaaatatttcatactacgtgcattttatccaaaagaagataatggtttacatgaattatttaattggtattactaatttgggggaggtgatttttggttgggggcaacagaatatttgcctaaaatgcattcagagtgcgctgttatttagctattttcaaggtagagggatattggcattggagacttacacgtagccatacaatggccaacttcagtcaactacagaagcaatacagggcagcggctggaacaaaatagctactaggtaaatattgattgaattaattacacggatattaccactagtcctgcaattaattaatacctagccctgtctccagccccagaatccatgacatcaagctaactaacagaaaacatatcaagaattttattccttagtcctcttgactgaccctcaagagggtctaccctcttctactctgtattcctcacatcaaatttcactagtccagccgccaagtaacacctgttctgactgtgctagtgaacttggatattcacacatagcctaaaatgggaaacagagttggaaatgtcatgtataaggacataagcgttttcaaagtgtacaagaacataagcgtttttaggagatttaccttctcttttctgttttattagcgaatgattgattgttttgtatgattgttcatttaacaaatgctatatcatgtaagaaaagttactaacggtatataaagatgtaaaattcaattgtggctgtgtgtatgtgtgagtattctagcttttggggagagacaagagaagaaagaagacataagttggaagagaacagtaaaataaagaaaaaagtaataactgacggtgtctaatgaagtagcccaggtaattaatgctagagtttattagatagaatcattatttccttccagagggattaagcaatcttctctgaggaggtggaacttttattacccaaaacatgaaggattgggaagagttttatatgtgtcgataaggaaaagagatattttattgagggaaaagaagacattttaatggcagagtacacaatgtcagaggaacagaccaaaagaagtgctttgttattaggaagatttgaagaatggaagatagcgtcagattgttaagaaccattttttagataaaggcaggctaaagaagttggaggctattggaaatcagtcacacaattttaagcaagagaatcaatgagtggcagttttgaaaactgaatttgatagtggcaaggaaaatagggctctatcatcccacttactttcaaagttatgaagaaattgtagtaagctccagtcagtacctaaaggaatttattttgtgaaattgtgtaaacaaaaagcaaaccttcttttgcactcatatagtatattttctcaaagtcatatagctaaagggaatgagaggtaaaatagtacagtggttaacaggataggcttcaaagcctaacttcttgggttcaaatcctagcttggttaccatttcacagctatctgaccttgtacaagtcacatgcgtacactgggaacaataatactacctgtattatagagttgttattagatgttgttgatagatatgttgggcacattttaggcactacatacataaacctctttctatagaagtatacatgtgtacctatatttaaaataatgattttcttttttaaaagaagcacatattcattgcagaaaatttttttgaaattttaaaagtaaaatctctggtctaagtgcactaaaatgttttagactttagatatgaactacaaaaacctacctcatcgacacccaaccccactcccagagatatttcattttatttgcttgctatcagtaatgagaagacccaattcaccacacaatttctgttgtatgagactattgtattgcagtgcaagatagtgttttaaatctttgttaaatcaataggtgcaatattacacctccctgtttgaattttcctagtgaagtcaaacaattttaataggcctatacataggtcagttatagttctttcctaaatggtctattcctcattatcctttttaattgagtatttgtctttttttctactgatttgtgagaatgtttttatcttaagagtgtcaaaaagatgaattgtttttgcctttttctttggcttgtttgattttttatgtaaagaaattttatactgctatgaatgtaagtcattactttatggcttttaaattaaaattataagaatagcctcccatattttcattacttttatagttcaatttttttacatgtaacatttcattcatctggtatttagttaggaattgtgtgagataggattttaaaattaagttaaaattcaatcaagtctttattttttaagtacagaagtttccgaattcagcatttacattaaattttttgaaaataatgctaaaatatcatgtaaattattacttattggaattgaaaattccctattattatttttaatctttataacaacttatgttatctatgcttctattataaaataaatgacaagccaaccaaaatagagaagatgcttatcacaattatatcatgataatttaaacatgattttggattaatcataatccaaaaatgcatttgataagcattctaactgttcttctagtccccataaaattaacaaatggcaaacagtaatgttttaattttcaaaatattcatattaatattcattttcaaaatatgtttacttgcatgcatttcatttatattatttcttattgaagttgacttctcaatgtatattgctttaatgatactaagtattaagggtatagattgtactcacacaaataactattgaaaagcataagtttaaatagatccatttatcaaatgatgtctttttttttcttttttttttttttttttttttttttgtgagacggagtctcgctctgtcgcccaggcaggagtgcagtggcgcgatctcggctcactgcaaactccacctcctaagttcacaccattctcctgcctcagcctccagagtagctgggactacaggtgcccaccaccatgcccggctaattttttgtatttttagtagagacggggtttcaccgtgttagccaggatggtctcgatctcctgaccttatgatccgcccgcctcggcctccccaaagtgctgggattacaggcgtgagccaccgcgcccggcccagatgatgtcaattttgaaagatactggaaagtatgttttgggagggaagagggaaggaaagagtagaatatgaagtcagtaaaacctggatatttagtgccatctttgttacttactagtaaccttatgaatattatttatattgttgatccttaatatcctcacttgataattttagaaaatgttatgtacttcataggatcatgggtagaataagaaagtgaatataagtaaaatccatcatgaagtacctgaaatatgttgtaaacctaagttataatagtaattttattgttgctaatatttcagaggaatagccaccaaaccagtactacttattatttatttctatttaacatataaaacatataatattctttctgagtggtaactttgaaaagggacaaaaatattaaaaattacattaaaatcatgtataatttataatactcctttcaaggttactaaagtgtgcatgtatttctaatcattcacaaatatgaaaatctatgtgtaaatttttaaattttctaaaaaattgacaaataaaaattgtattattgtcatggtgtacaatgtgatattgtgaaatatcacatattgtgaaataaacattgcggaatgactaaatcaagctatagaacatattcattaccttacatacttattattttttgtggtaagaacacttaaaatctacttttagtaatttccaagtatacgttattgttactaacagtagtcaccctgagttacaacagataactaggatttattcctcctgtcaaactgaaattgtgtatcttttcatcaatatctcccaaatcaccccacccccaggatctaataaccaccatttttctctgtttctctgagtttgacatttttagatttcacatataagtgaaatcatacagtatttgcctttctttgcctagcttatttcacttgacatcatgtcttccagttcaatccgtgttgttgcaaatgacaggatttctttctttcctaaggctgaatagagttccattgtgtttatataccgcaatttctttaaccgttcatttattgatggacatttaggttgattccatatcttggctattgcaaatagtgccgcagtaaacatgagagggcagatatctcttcaaaatactgatttcagttcttttggatatatgcccagagataagattgctaaatcatatggtagttctatttttaatgttttgtggatcttccatactgttttccacaataattatactaatttacattcccatcaacattgtacaagggttctcttttctccacattctggccaacacttttcttttgtctttttgataatagtcattctaacaggtataagatgatatcttattttggctttgatttgcatttccctgctgattagtgaggttgatcatttttttttttcatatgcttgttagccatttgtatgtttgctttagagaaatatctattcatgtcctttgctgtgtgtcgatactgatatgtaaaatatgcatacaaaatcaaaaccataatttatttttaatatatttttaatatgtcattaatatttttcagtgtaataggatgtttttcataatatttactttaatggacgcaacatatttcattatgtaaaagcagtttattctatttggggagatttcgtttcactttttcgccagagtgacataattgaacattcttgtcataggtctctgtgtttatctctgatattcccctaggaaaattcatagaagtagcattttggagttgaagggaatgagtaatcttaaggcttttaaagtagttttatcaaattttctaaactgaagtataaagacacatagaaaagtacacaaatcataagaatagaaattcagggatttttaaaaaaaacttagtgtatccatgctactaccaccaagttcaagaattagaacattacctcaggagcccctctcatgttccctcccagttatgagcctctcccctgccaccaccctctcccaaagataagcactcttttgacttctaacacctagattagttttgactttgaaattactataaacagaatcatccagtatatgcccttgtatttgacatgtcctgctcaacattatttttgtgatattattctatgctattgcctgtgccatagttagtttagtttttctatgtatggtattctattgtgtgaatatgccacagtttatccattctgctaatcaatggacattgggctgtgtctattatggggctattaggaaaaatgctggtgtgatgttcctgtcctttgctgcatatatgtatatatttatttttaatatacgtggaagtacaatggctaggtcataagatgtgtacatttggctttggaatcaccaaaaaacagtttttcagtgtggtcatttcagttcattttcaccagcagtatataagacttctagttgatccacatattcatcaagagtatgtattttcaacctttatccttttaaccatttaggtgaatgtgaaatggtatttcattgtgttttaatttgcaatcacctgacgattagtgccatttttatatcctcttatgtgaagtcattatgcaaatcttttgcccattaaaaataatagttgtctttttcttactgatgtagaagttatttggatacaagtcctttgtcagatctatgcattgcgaatatctttttccaacctaaactttgctttatttttttctcttaacaatctttcctgataaatggagtttgatttatcagtcttttcctttatggctaatgctttttatgtcttgtttaaaaaataatacattaacctaaaattgttgagatttttttctatattttcttttgaaaactttatttttttgccttttacattgaggtctgcaaacaatctagaatttatgttttgtgtatgatgtggagagtcaaggttcatgtttttcaaatgactaatcagttaacttggtgctatttactgaaaagatcatccttttccaacttaagtgacaccatcgtataaattaggaaacgctatatagatgatttgttctcacttcaatcccacacaggcttaattataataaatattcatgtctggtggcaaacattcttaaacttcgtcgttcttcaaagttgccttggatattcttagccctttgcacttacatataaatcttaggattggcatgtcaatttctactaagaaatggttgctgcaattttgattgagattgcattgaatttatagattatttgaagagagggcagatatctttacagtattggactttctaattcatgaagaaggtagtcctctatttgtttacattttcttcactgtctcagtagtgtttgtagtttccagggtagaagcttaacttttcggtctgaattaccaaattactagcaacatatatagtcatgcatttcttaacaaatgagatatgttctgaaaaatgtgtcattaggtgattttgttgttgtataatcatagagtgtacttacacaaagatagatggtatagcctactgcacatccaggctatatggtacagcatattgctcctaggctacaaacctgtactgcatgtgactttactgaatactgtagtcaattgtcacacaacaatatttgtgtatctagacacagaaaatgtaccgtaaaaatacagtatacaaatgataaaaaatagtacagctgcatacggtatttaccatgaatggagcttgcaggactcaaagttgctctgggtgagtcggtgagtgagtggtagtggtgagcaaatgtgaaatctaagacattattgtacggtaccatacagtttacaaacactgtatagttaggctgcactaaatttatgaggacacatttttatcttttttttttttttttgtatttttagtagagatggggtttcaccgtgttagccaggatggtcccgatctcctgaccttgtgatccacccgcctcggcctcccaaagtgctgggattacaggcgtgagccaccgcgcctggcccatttattttcattaatgataagttaaccttagcttatagtaacttttttactttataaactttttttttaagtttttgactctgtaataacacttagcttaaaacatgaacacgttgaacacccgtacaaaaatattttatatccttattgtagcagctttcttatttttaatatttttgctgtttaagcttttctgttaaaaagtaaaacacaaacacgcacatgagcctaggcctacatgggtcaggatcatcaatatcactgtcttccacttccacatgctgtcccccactggaaggtcttcatgggcaatgaaacattcatgaaactatcatctcataggataacaatgccttcttttgaactaattaagaatatagtaaatacataaaccaataacagttgtttattatcattatcaagtattgcatactgtacatacttgtctgtgctgtatttttatataactggcagtgcagtaggtttgcttacaccagcatcaccacaaacgtgagagtaattcattgcactgtgacatcactaggtaataggaatttttcagctccattgtaatctcataggatcacagtcagtctgttgactgaaatgtggtgaatgactgtataatagggctccaaggaagatcataaaattgcttgttttccagaactttgacaaagaccttttacagaaactaatataatagataaataatagtataacattgctgttttcctttgcatttcattgattactaactgtctggattttttcttgtttattggctgtttacatttttgtcaatttctttttatgttctttatccagttttccagtagatttttcctttttttactcattaaaagatttttttatatgctaaaattattaccctgtgtctgatatatgctgcaaatattcccagttgtcatttgttttaattttgattagtggctttaatttataagtgaatacgcatattatattcaatctttttatattctttttttgcttctaaaaggcttccccacgccaatattttattccagttcttcttactatttttatgcttaacactttaatttttctaaaatgttttgtgttatgaaatccatcttaatatgtttatttctaaaacagacacttttgcttatcttaatattaaaacatatacatttgaaattaacattcagagattgaaagaataaggaaagtaatcttgtgtgaaattaggtcaagatgtgcttagatactaaattaacacataagggaattgaatgtgtttgttttctttcaccacagggaacatgttatatgaagagcatggttttataatacataaaaggattattagaaaaatgatgtattttaccggtcaggtgtttgtgtctatactttgatgtgaatgcaaaatagtaaatataaatgtaaattaatttaaaacacatagaatctgatacaaaccttaatctttttccacgttatacattactcacacctgttatatttttccgtgaagtatttggaatactctcgattcctggaaactgttttaaagtgcagaagagcacaaaaaaaatatgtgttaaaagttcttgatttccacccaaccattaagtgatattgccaaagaaaactcttcagagcatttttcactgatggctttagatatgttataccagaataataatgattcattattaaaatatgcaaagtgtaatttctcaacaacattttgtggtaggaagatgagctggtacagtagttttccttattaaataattttttacaaaagtaattgacatggtttggctgtgtccccacccaaatctcaccttgaattatggtaatccccacatgtcaagggtggagccaggtgcagataattgaatcatggaagaggatcccccatactgttctcctgataatcagtaagtttcacaagatctgatagttttataaatgtgagttcccctgagcaagctctcttccctgctgccatgtagaatgtgtttttgcttctcctttgccttctgccatgattgtgaggcccccccccgccatgtagaatggtgagtccattaaacctctttcctttataaatcacccagtctcagatatgtctttgttaacagtgtgagagcagactaatacagtaatgcatttacattgttcaaaatataaaaggtacagtaaaaaatatctcaccctacccatcatctgctctaccctcactgcacattaaccttaattctagaaacaaatctacaaaataaattcctgggaataaaatttccaggtcaaagtttacatgctttttatagatatggccaaactgccttccacaagaggtacacaaatgtatacttcccaccagccacgtagaagagtctgcattttcccacagccttggcagcatagtgtacctgcagacttgaatttttgccagtgcaatagatgaagctctaattttcatttctctcattattaccaaggctaagcttctgttcatgcttttaaaatcctttgtattttcttttctgtgaactgtccttatcttttgtccaattttcttttgggttgttggcctttttcttattactttgcagaaggtctttcatgtgttaggaaaattagtcccttagacatgagtcacaagcatttatttttcataattgttcatttgtttttgattttgcctatggctcttttggtcgtgcagaagcttttgattttttatatagtccagtttactgatatttttgtctgttaattaaagttatttaacttgaggatacaatttacatttttttgtggttgactactatagacatatactgcttcttacattgaaaaaataataatcctgaatttggaaattgtttttaacaaacttttggtgaaggtccatcatatttaggaacagagcttgtttgacccagaaatcaaaggtcagtgagaaggagcaatgtaaatagaaagttaaatagcatgaggtaaatgttatgatggtgggaaagacaagatctgagaggataaacctaaagcaacatcataattaagctgaaaatttcgtctcatgataagctatcatttcattattccagatattagtcaaatctgacccattacactgttttctgtcaggaattgttttacctctattacaaggaagggatagtatgggaggatgataaggaaaccagcagtcttagttaaatgttatacagatttctgtgcttatatatgaagcctaaatgaaacgtgaacaatttcatgatcagataaaaaggagttcatcgctcagttttagagattttaggaaaatatgatggctattatctcagtagcttcagagtctagaggcatttagatgttgttagttgaagctgtaaaacgctttttacatctacttgtgagtagaaaatgatccaataaaaataaaatgtttagttacctcctttaaaatgcttgaaaaataagttgaggacatcattagatcatgtattacagacgtaggagtatatttgtaacatcacctacatcacacatacctgtgtgcgcgcgtgcgtgcacacacacacacacacacacacacacaagagttcagcaccacaggtgtagttatggatgtgaactcacaaaacacaaatcaagcaaagagaacaatatctcaattcatgattcatggacattctgtgctatctgaaacacaatgcttcttttgcccaactctcacccacacagggaaaggctgccaggaatgagaggcaagaagtgtgcaggtcaccttcaacaggagccaccacctgtatttcccatcagtcttttacaccattgtagtcacgtggatccaaggactgtattccaactgacagctcctgcgatgaggtgcagttccacacgacaaagccaggcccaacatttcccattcatcttaaagttagtgtttccaaggaaacagtgctgtgggagcctagggtcagtcccagactgacctgcaacagcccaggctggatgttaatcctttgcttatacagtctcatgaatttttcacaacatatatacatgcatttacaagacgtttcactgtacatattgtttacgtatacaatcttgtttaaaattcatttttctgtacattaattgatttttttctcgacaactttctctttttcatctcctaactcttgcatccaattaaacaatgtactgttcattagtgacttattttaaaagtatctaaaacaattgttccaaagcatgtgacattgtttatgtgacacactggtatattatctagtttatttttaaaatcttctctattattattcataatatattattatggaacagatgtatattataaaattttattcatattgcagtgtaatattttgtattacagtggtattgttaatagtctcgtaaagagctatcattacaagtttaaattctttattctgggatgccagttttaactcttgatattctgaagaaaatagctttactcttgtttattctggctctgtttttttgttttgttttgttttgttttttgttttttttgttttttttttgtagagatgggagtgttgctatgttgtccaggctggcctcgaactcctgggctcaagcaatcctcctgcctcagcctcccaaagtgctgggattacaggcaagagctacagtgctcagcctatcctggctctttatttacatgtaagcttgagcaataatcactgctacttaataactttattgtcattcattatcatgcagagtattgctctaaggtatgttcagggatgacgttactgagtcctaacagtaatcctatgaagcaggtgctatcattgtccccaatctacagaggaggcattgagagttagagaaaacttggctaaaatgttaggcaagaactagaaccagaattgaaatccaagtggcctaactctagacctcacaatgcttaataccatgtcatgctgcttcctaacctatttaatgtttttttcaaccccaacgtcatcacccatgtgtgatagtgggatcataataatatctatgtcgtagcattgttggatggattaaggaagtctacaaatgtgaaacttccaaggatgatggttggcatatactgatctcttaataaaaataacctataatcattctgttacagtctactctaatccaaatgttctttttacttctcatctcaaccacctgcttctgtttactaggactcacaaactatagctcacaaaaacgcataacttaccaattttccttgtacatgaagggacttccttttacaatcttccatgacataaaagaaagctagaagcaagtatagtagaagaaatgattgctatacaaacaaaattatagttggtttggttttaattttaggatgcgcattgaataaaaatcactcatttgggatttagaagacctgtgttatatatctggtgctaatgctgaataacttggcttattcatttttataactgcaaaggaagcgcgtatggcatataatacacaacacaccagtatatttagtaactgagtgaataaatgaaagatgtatttctttactttatcagttgcagttggctatgcctttgtgtaaggtgtgtgttttgaaattccaaaaaggtattagtttctttaaagcaaagaatttttgtagcaggttaatgaataattttgaatacattggttaaatcccaacatgtaatatatgtaaataatcaatattatgctgctaaaataacacaaatcagtaagattctgtaatatttcatgataaataacttttgaaaatatatttttaaacattttggcttatgccttgagaattatttacctttttaaaatgtattttcctttcaggtttccagagctttacctgagaaacaaggagaaattgaagctcaaataaaagaccttgggcagcttgaaaaaaagcttgaagaccttgaagagcagttaaatcatctgctgctgtggttatctcctattaggaatcagttggaaatttataaccaaccaaaccaagaaggaccatttgacgttcaggtagggaactttttgctttaaatatttttgtcttttttaagaaaaatggcaatatcactgaattttctcatttggtatcattattaaagacaaaatattacttgttaaagtgtggtaaggaagactttattcaggataaccacaataggcacagggaccactgcaatggagtattacaggaggttggatagagagagattgggctcaactctaaatacagcacagtggaagtaggaatttatagccaaggagcagtgtaggagtcagtagatggaaaattattaagaggaaacatcaggggtaagtgggattctggctaaaccaacctcacaggattcttgctgaagataggccagggttatcttatcagacaacccttggggaatggtggagaatactgagggtgatcaggtaccaaggataaagggttcttgtaaaactgacaggcttctttgctgaacctggattttacaggggagtgcaaagatgagcccaggcgaaggttcagaagcctgactaaagtttagtcaagcagggaatctttgtcatcatcatcattgttgtcataatgataataattattattattttactagaatatgttgctttttcctcagcatttactagaaataaggtcttcattaaacttatgttactagaatgcctgcatcatatttgttactgtgattcattttctatccctgttttaattgtgcttaatacatattcatagattccttatccaaaattgaagttgtttatgagattaggttcctaaaatataatgtctgggctcttttgtagacattgtaaagccctctcagactgactacactttacctttctatcttctcattctgccagcaatctccccgtatagtctggccacatcaaattacctggtacctttccatccatgtaatttcatgtcatacctgtgatcttggttttctctcttctttaaatgacttctttcagtttattttgatataatgaattttcttccattctttaagaatgaattcaaagtcattgcgtcttccaagttttcttccgtaccccaagtagagttagaatccctgttaggatttcttataaacctttttattcatctcccattgttcatatgttgatttacacttaaattttatacacctgagtatttcattacacatctgcactgttctttgagtgcagagggcattctcttatttatctctgcttctccactcatatcatacacactcagcctaggatccagtaaatgatgcttacttgtgagtgtttttaagtcaatgaataaagacagtaccaagacacccagaatacgaatgagatactgcaggtaagcgtaaggcttcagacaatcctgccaattgaacaccactatctccttcttctagtgtccttgtaaatgctgattgatcttcttttctccctttcaaggaatctattccaaagattctttcaatatgctgccccgttttgcgtctccttatttgccaaaatctttaagtagccaatcaaataaaccgaatcgttgaaattacaatctattaatgaatgtattgttgggcaacttcagagtaaaaaggataagtaacatttttgagtagttttttcttttatttaattgactttaattgttaaatttatttactgtccagtattgtaaaaacctaacattttaatctccatttagctgttgttttgctggaactgagagcaaagggaaaaggaagtttgagaatattctagtgaagaggaagtaaaagtttcgggaagatgggcatgagtaacaaggagatagagggaagtttgctacaactaaaatgagttagattagcaaaatgttctcgactatgtttaccttacttcctcctgacacttatgtctaccattctgatagctactcctcaagagcagatggcactgtggaagtcacaagtagacatcatttcactagcacaaaactcagcctgctcagccagtggcacagtcttgggttcagtctgatgattaaatttacgagacataataggctttacccagtaacaaatttagttagctttaagaaattatacaggatgggtaacaacagcctgcacattaaaggcacagtggaagtcttgataccaagacgtggcttctgatgtcccatcaccctgaattttagtcatacatgatcacaaggggcaagactgggtgcgtacaaaacacatcatcgtctcagggaagccatcagttctaggatcctgaccatttctccacttagctagtacatattgtactcagaggtgtttgactagctcctattcaccagtacaattacatctcatgaatactgatttttcactgctcaataaacaaccccaacaagaaagtacagttacttggcccaatacacaataaccttagccaaattctcaattatcttatatccagtatattcttaaaaagtaactggcgtaatattgcgaagaggaaaggtcataaagtctttcctcccaaccagaaatagctttttgtagctcacggtaaaagcacattctactcttttaaatgcaatctttggttaaaatgtgcctctttattataatagtttaaaaaatactcaatgctagctatctctcttcctggaacacatttaagaaaagatttttttttgaatcccttggtacaaatagatcctgtttactcaatcaaaatgacttttgtcccagtctgtgccccccggaatggttttcaaataatgaaaacctgcattgtgtcttcgattgtctatggcccatagggctctgccaaatgggtccctgcagtttgaagtgaaagccatactcggctgtgttaatcacttttctttatcaaagctacaagtcaccactcactgctgtgtgtagtttctgagagtcatgatatttgcctcctgcagcttgttttaaatcactgaggggagagggagctgcttttttcctggcagaaaactccttggcttcagtcctctgagcacattccgagtttcttatctctggagtgcagacttcaaaaatactcttttagcctttttcttctgcttgtggctgtgttcaaggtggggggaggggaaacataaaatcatagatttgatgacttgagagtttctcccaaaaattctcaaacccccagcttataattaggaaatggtgacctgtgtgaataataatttaccttgttttttatccctctttgtctagcttccattcctttcactaataaatgatttattaagattgcacagtttttctgatttaagatataggatattagtccttacagcctgctgtattcctctgcttaaaggaattaaactatttttccattaaagaaagatgggacactagactttgctttacttagtttcaaactactgaacaccaaaaataaaatttttaaggagttttgagcacatgcccttttttttaacacaaggtaaaaaaaaaaaaacacctttactaaaatcttaagaaagagttaatgcaaaggaagtagatatacgaacagccacgcccctagctccaaatcctaaatgtaaagaaacttgccttgtctggccatggtggccatagctgcctcggaaacaaagggtctgaggccttgccattcgggtagtttgttttctctagtcaaactctgagcacacctgttagaaaaatatgtaataccctctctctgtgagcctcagttttgtctgcttggtacttcactcttattgatgaaatgcagctagctgtgtagtgaaacccagataaaaaaaagctttaagggctgtgttctaatacattgtttatgctggagtgaaaattgactgcacattgcttggtttgtgcaatttactcccgaaatattcctattcaggaaatcctgcaaatagcaatattcatcttgaaaatcacctcacagaacccttagcaagctgagaaacataatcaatgagatcgtgatgtagagggtgaaaattaggcgtaatcacagccctttcccatcagtcagcccactagaaggcatgcctttgaattttgattttcaaatatactctcaatttagacataaaatatgttgatttcagatttcagaaatgataattgaatgctaagatcccgggaccagtttagaatttctataaagggtcttatgtttttaacctttaatgaatgctttcaataatgagctagaggtatactatttatctgacataagactgactactgctttccaaactttttattaaaatatgaggtgtggcgggacacataattttatgttaaggcttagtgactgaaatactttcatcttaatcacagggagggggttttttcctcccctcaagaatcactttccttctgtggtttataaataaacatgacatgtggctctgctggctcttccttgcagtataaggagcataattgcccataatgtcaaatccacactaaaaactaccaaaggactcaattgtagtgactgaccattaaagtcactgaacactgtgtgtgttcacattgctgtgagtgttgtcaaagaaaaatagcactagacaacagacaagaaagactgtgttcaaaacttttgcaatagaggagacagattgaactcaattctgctgaaataaaaggcaggagagcctctaagtgctgagatgagttagtgagaaagtactagatatcaggagggaggttagtcaatgtgcttatttaggccatctgtgtttgctgattggcacttatcaaagttagattcctatcctcccaacagaagactagcagattggggcactatcttttttgatgattctatatcaaagtgctagctcccaagtccttgagaaagtttattcctgaggtataaaagtggcaagaggctaggagaatatttttgtctcaaaaaagtagagaaataatatataaagttttctagagtaaatgctctaagaaaaggaaggtcaggtctaaagtcaggaagaaatctgtctcaaatgtagtcaaactcagggtatttttaaagctttctttgtcaaccctccattttgttcaagggaaaccagttttcccattgaaaaacttaggaacgccagttcatctagttcatttcagcaggtttctgttgttgaaggactagctgaacgaactctgacacttggtagtaatcagacatttcatgaaggagatttccatgaaagttagaaggaagacgaagattaatggttgaagcagactgcaaactcagtttttgagtccagagggcagcaagtcaaaaagattcctagaagctgggctgtaggcattctcagatggtagagtgaggatggcagtagcaatccgatggatttcttggagcatggcacggaagaggttggagtttactgaactttttgcatggcctacaaagcagcagctccaggcatgaaagttgtctatacataatttgctgtggtggtgagtcctttgtagtttatagcaagtcatccagcttctgcttgcagggcttctttagatattgtggggaaatggcagctataagacaacctagagaagagagtccttatctcagtaataatatgggcagtcacgttttagttctcagtgtcaccaagtcaggatggtgggagaaaaatttgaaatgttaatttggagaatcgcagccagattgtaaaggaaataaactgaaaattggtaaggacggacaaaatgtgtaagacagcaggatccagatcaatttacaggtaggtaaaaaaaaaaaaaaaaaaatcatgtcgtttacaaagaaatgcaaaatagatcaaagacaatgaacaggactagaatctgataaccccaagggttactgaaactctatctctaccatcacccttttgatcagtgttaatcaaagtaagactttccttgtttataaaataagactggcctatttatttatataggggtagcaaaaatggtaatttaccaaataggctattttaagtgtgattagctggaagttttcatgaagaatcacaagctgaataagtttcagagatatactgtacagcatagtgcctatagttaacgatactgtactgtacaattagaaatttgctgagggcagagtttaagtgttcttaccacaaaatactactactctcttttaggagcagtggtacataaggtgagaggaaacttttggaggtaacgcataggtttatggcatagattgtggtattggttttgtatatatactttatctccaaactcatcaagttctatgcattaaatatgtacagctttctgtttgtcaatcatacctcaataaagtagtttaaaaaatatgaaacctcagatttgattttttaaaagtctccaaagtttaggaaggcaagtcaagaacttgacatcagattttacctgaagtaaaatacctatagattcagctgaagtgttctgttttccaggttcctaaaatacccttggtttcctgggtctcctaagaatagaccttccttactcagttgtaagattgggaattctgtaagccaggtaccgggacagttttcccaaaaggggcttatattagctccatatagtcaagagtagctccttaaaactggtcacatctgactctatgcacttaattctcaaatatgacattccagtcaaagccttggttatatatttttttcaattatgtcttgttacctaaatatatttattgagcctatgcaaataattatattgccatgaaaataagaatactcggtaagaatttctgaattttacagggatcaggcagggataaaaagattaatgtttcattctgtttacaaaagcatactctaaattctcatgagttatagataacttaagagaaaaaggaaaggcgtttcttgtatttagcaaacagaacattaaaacatgaggaatattttaaacaaaagccataatcaaatcttttatcagttcattcaggcccatgtagttaattcttgtcttgcttgatcttgagttagtagtttcatgaactcatcagcttcttcacagagtttcataaatcctgactttgtccaatggtataatctcgaagttatttaagcaatggcatcagaagtctgtgtcccagagtacctgtcgtagtacttcctatgggtctcaaagatggtcctgttttactgaagatgatgcattctgacctctaactgattgtaagagcactcagggaagcatcagcataaaccaaaaactatctgtgaacgacaaaagacttaaaatggccataattaaagatctgattcattcgacaagaaattttttttttccctggtgccatgccacattttaaaataacaactggagttaggactgatgacataatattattatcggataaagtagcaccaggatgtgtcatggacacctagagcacctagagcactaacaaagttctaaggatttattataatttttcaagtatttatactaataatagttgacccatacaactataacctagtcaaggttcagcatctcttcttgtcaaagctttttatgcaactcaacataccaaatgaacctagttatttttaacatccttcattttacaagggtgcaggaacaaatcctttgaaatttttcaaaccaatctgagattaaaaaaaattttatttaagaattgacctgggaaaagcaaaatatcaaaggttgtaaaatgacaaaaggtttgaatacttggctgaataggatcattgctcactatgaaagaatgcatggctacctatgtaaccaagatgacaataaaagatttcaaaaataaatgtagaaggccacatgacggtaaaagtttttagttctttccaaagagaaaacactactttctaaaaaaattcaaggacatacaaaatcaacacaggtacttattctgataagaaacaatatttgtttcctatacagattacccaaaatataaaaaaaaaaacaaattttgcaatctcttattaagagaagaccaatagaaaagatgaaaatgttaattagtttgaccgaaataattgttttgcaattttgtgtgtgcgtatatatatatatatatatcaaaatatgttgcatacttaagtatattcaattttatttcaaaagagcagaccaataatccaagaatattttatcattttttaacaaaaagaaactacaactcatttttgatcaatacactgttgatactaagggtcatttgtaagagtttacatacacataaatccattccgttttagccagcattggctattaacataagactctccttccacaaatcttctgccatttccaatgttcattcagattttgtcctataccttcctcttcctcattttcacagtcattttaatttaggacaaagttattctctttttccttaacaaaaacacatccaacataccttgtatattttgcatacaaagttgtttccctttacccctaatgtttctggaagttttatttacatatattgattatatttttaaccattagtaagtcttattttatagagaaaactaggaattagctaagtgtgaactgtttgtcatataccagtatttcatagccaactagcaaagcttatgaatacaagttaaattcacctactcaatatgagggctaaaagtttacatcaatatttgtggaggagccttttaagattttcttttgccctgatatgtaatttatggaggctgtgttctaaaatttgagtaaatgactgaggagatacctagtggccatctgggtatctccaaatcccatctgaacgtacacggtatccagtctgtttccaattagctttttcaacctcaggtggttgcttctggggtttgagttttccagagcccccagtagtggcagggagcataacgctttagagaccatagagagttgagagactggagtaggaagagaaaggtctgtcatggatggacaaagagatggagcaggtacgggtttgaagaggaatatgctgaaggatttaagggagctaaagggaagatcaaaagtagtcaaaggaagaaggaggaatggtggtgatgggaagggagaggtcttagatgagccagcttagggagtgcttatgttttcggaagaggccattgaagttcatctttagtaaaaatcaaactaacaagaagagaagcctagtttgtgccatagaggtgaagcatctaatcagcagtagtcttcagaggaggagaaacagaatagtgagaatgtctcctggaggaaagaggcaccgaaggaacagcaacaacaaaaaaaggaaacatgaatgaggtctctacaaacgtgatctgtacagaaaatgatttctctaaatactgaaaatctgaagttgaaccaaatgagatttcaataagaattttccatgttctaaaccaatgatgcttttcaaacaaagaagcctgggactctagactcaagaatatactcagattactgagaatcaaaatctgatgttaccatgcttccacgctttcgtgggtaaggagtcagacttaccaatggattcccaattaatcagtcaggagtgtactcaacattcacaaaattagctttgcagaggttaatgtcattaaattcactttagaatggataattcaaattcaaatagtaactcccttagatagatgtgtactagctcaagttcacctgttatctgatttcatttttaaaaaaaattttttaaaagtggtgttcgggaggtaaggaacaaggaagagacctttagaaaaaagtttcagtgttttatattggatatgaaaatatcagtggaatgtgtcctgaaaaacactggatgacagttactggacaaaaagacaaattattcccttttaccatgcaactgaacacagatttattgaatgtttttctcctgagtttaggttgcctctgggcaagagtataattctggcttgataacaccttgaagcgtgtttgtttaagtttgtggatagtttcatctattagtggaattaggcatctgcttctctttatgaacactgggtaccataatcttcctcttactttttgttttttctactcaactccaaaaaccattgctgagttgaagtagaataataaggggaaagaaacaaaagactaagtttgaatcccagtgctgacacttactggctttacgatattgtttaactcacttaccctttttaacctgaccttcttcttcactaaaaatgaaaaattgagtgaatttccctgggactctgttagataaggcaaaactaagatgggaacacatttcctaaggcgtagaaaaagacagtgaatgggacctttcttgttgtatcaggagttatggtaagaggtactaacaataaaaattaggctttcagccaggcatggtagctcacgtctgtaaccctaggactttgggaggccaaagcaggtggattgcctgagcttgggagtttgagatcagcctgggcaatatagcaaaaccccatctctactaaaaatagaaaaaattagccaggcatggtggcacgcacctgtagtcccagctacctgggaggctgaggcatgagaattgcttgaacccaggaggcggaggttgcagtgagccaagatcacaccactgcactccggcatggggaatagagcaagacttctttaaaaaaaaaaaaaaaaaaaaaaaaggccttcaaaatacccctacagcagcaagttggtaccagaaaaacactccaaaaaagggagtagatggtcatgagattttcatcgttcaccaacctaacttgcccatataaggaaaaggataaacttgagaacagtttcttgaatgagaattcctggaacagatcattcaaataggactaacaatttgttggacatgagaaaacttctatgacttttactgttccctttcttatgagggaggggagaagagtgcttttcctctttgccaagccaaggaagagggcttcaaagaacctctattatagtggcattcagaccattgtatttataaaaaataaaaatattttagaaaattgaatatctgcttgcacattttaaagatgacatctattttctgcccttgggatacagtaaatattgacattttaaaagggtttatagtacagtttagaatgtatcccgtggaatccaaataccattgcaatataatgtctaccatcatatacttaaaaatacatgaaaaagctcatatttaataaatagaagttttatattattcctttttatttaaatcatatttttcaacttccccaatgaattgtattctaatgtgataaatatgtgatacatatttatgctataaagttttattagccactctatcataattctttataaaattatatttatgtggacttaaattcaatttttaaaaacaatttcctgtgactacaaggctctaagtatttttaaaattctctagattgagtagtatttaaagtattaataataaatacacttagtaataaccaaataacctaaatatatgtaccttttgataaataattattaaacatactcagtggatagttattgaaaatgaatctattatgagatggatgggtatttgatggtaccttgagtaaagaaggatttcagtcgctaatattttgaattgtacttttatttggcataaatgtatcttgactacaatgcaccagtgggataggtcagagaggtgtgcttttattttgtaaagcggaagaaagtctgtcattaaccaaaaagtgggcaagaaaattggaatgaagtgcctaccacaggaacaaatccagtcaaatcttttttttgtttgtttgtttgagacggagtcttgctcagtcgcccaggctggagtgcagtggcgtgatctcagctcactgcaagctccgcctcctgggttcacgccattctcctgcgtcatcctcccgagcagctgggactacaggcgcccgccaccacgcccggctaattttgtgtatttttagtagaggcggggtttcaccatgttagccaggatggtctcgatctcctgacctcatgatctgcccgcctcggcctcccagagtgctgggattacaggcgtgagccacctcacccggccgcaacatgctgttttaatgagcgcctgggtgcgggcagcctcaggcctaaaatggcgttagccccaagtgaggactggacaaaggttttatagtctcctgtaaacaggaagtctcctggcctgacgtaactgctgcattgtacccggatggcctctttctcgatcttcagaggtacttgtcttctggccggctctcttcctgcttctgctatttcgccggtgcatgctgctcaggcaagtagccttgtgccttaggaatgggcctgagaaaggaggagttactcatctccttaagctttcaggcccgggagagaatcttacaacccactgatgagttatgaaatccatttaatgggtaaaataaaatagaataagatagcatagggtaccaaagaatataacgcaggttattacattgtgttacgtgtggtatgcttaagtgttgttttctggaactgttgttatcatttgtattgtacttcatttttgtttcgaattttaagataatctgcacagttttatagaaaatgagttaattagtactgtatcagtgatgtcatactgggttaattattacaaagttgggggtaaatttatccctgtataacagactttaaagataatataaataggccaggcgcaatggctcacacctgtactcccagcactttgggaggctgaggcaggtggatcacgaggtcaggagttccagaccagcctggccaaggtgatgaaaccccgtctccactaaaaatacaaaaattagctgggcatggtggtgagtgcctctaatcccagctactcgggaggctgaggcaggagaatcccttgaacctggaggcggaggttgcagtgagccgagattgcaccactgcactctagcctgggtgacagagcaagactccatctttaataataataataataattttgtttatttattgaatagatactttcttccagtacaaaattcaaaagcattgaaatcctctgttgcattgttgtctttcagccacacagtttctctccccatgtgctgccaaggttttcagtttcctgggtagccttccaagaataggatgtaggtgtgtgtgtgtgtgtgtgtgtgtgtgtgtatattattttctactcttgtcctcttaaaataaagccagctgttagaatactataaatactgtttctgcatccttcaaaagatggttcttttgaagcccttttccttggcttggcgagggcagaaggaaaagcactcttcttcctccttcataagaaaggaaagactaaaatgcctgtgtgtgtgtgtgtgtgtgtgtgtgtgtgtgtgtatagcactcttctccctcccttataagaaagggaagagtaaaatgctgtgtgtgtgtgtgtatatatatacacacacacacacacacacacacacacaggtgattattttctgtattagtagttaaagaactgtctctttttttttttttttacagttgcatactattctgttctaaggatataccataattcacttaagcagcactccaattagtgagcctttagtttgtttcgacttttggctaagataagaaaatgtataactttgtgcacatcattttacacgttgcaaatatatctatgtgataaattcctagccgtcgaatggctgcgtcaaactggcatttgtcttgttagtacattttgccaaattgctcttcatagaacatctcgtcagtattaggaaaggtttcttttccccatacccgtgcccactcagtgtgttatcaacctttttgatcttctaaacaagaaaaatggtgatatctgtcattttaatttgaattctttattcattttgtgagtgaatttgaattttttcatgtgttgcagaatcatttttatttccttttctatgcactgtttgctacttttttgttttttgccaatgttctcttttgggttattggtctctttcttactaaggcaaatatagtttacaacttgaagtaaaaacatggttttctatgataaaggttttaatgaatgttttctacaacagacagattctagtcttaaggttataacctgaaaacatcaaaactaacctttgaattgcataggaatggtctttgctcttcttagccatcaatcctggacagaagttcaacatgatgacaaattgtagcacaagtagagatttaaaaaatttttaactaatatgtaaatatttgctttcattttcttatttatctaacaatacattgatggctagaacagggtttgtctttgcaaagagcctgtgtcaactgactcccattctttcaaaatacattacctaaagaaggtttgtggcttctctttgcattgcattttctagccaaatctgaaataactatctggaagcttaacattttattcccacacttatttttccttgtgaaaatcaaaactgcactttcccagtcttcatgagtaaccacaatggtttgccatttgacttgccagttgtattagcatactgagatgtaatttatctgcatcaagagagttaattctgagcagctgggggctttctaatctctttacccatcttggacaccagttccctctcactgctatttgttttattctttgcagttagaataccattcctcttgacatacaagaaacaaacccaatagaaattaaaaggttccaatttctattttccattcaccaatattataccattttctcctaaagcagttctactctctcctagatcattctcttgcttttgaaataaaccttaaaaagtcattttgtcaccctaaatatgtttatactttcttgaaataatgcttttactgcatattagaattttagtttttacttagcagtccttcactactcctttagaaggaaatttagataatactttgaaggaagttatgagagaacgtcagaagccatgctatcagttttttttttttatgtactctaaagaaaactctgctctgcccatgggtgtcatctctttctgattctgtgtggaggagaaaaatgggaacacttccaatcattttcaaacaatttctgcttaagtggatgaatggaccacctggtttactaactataatgcccaggggatggctttgattggcagacagaacgcggtgcagaaacaatggaagttaaatgaggaaggttttaaacttgcaagttacctcccttggtggcattgactgttggtagaaaataacacgttgggatttcagatacattcagacatgctctgcacttgcaatttgcaatacttaaaacaacacaattcttctaatcataactttttaaaaaatttggccacctttctccattgtctcataaagctatattcatgaagctgtttattcacaaagtcgtatcatttaaagataagtgttatatccataagtatgtaaatgaattaaaatctgggaggctaacacttatccattccttattctactatatcctatctagagccatgcttcttaaaatttaatgtgaaactgttatttctggtctgtggaaccacagtttgaaaagcactgtcatagattcttaagtagatacattttcatgcatacaataaatatgcaggagaagttaaatgggtatgtccgggagtcaaatattgattctcagaatgaaaacttcttcatttatttctcagtgatcttcataaccctttcccatactgggcagtgagaaaaaattatcatctcactctgaaatagtgatttcaccagtctctttttatgggttgggacctcatggataatgaccagtcttttagatttccttgctctcctcctgctcctctccaaaatggcagctgggttgacagatgaggaagcattatacatgacctgagatctctatgcaggtacttgcagtctcctctgaccctctgctctctggaacagtgcctcttgtctgcctgataagtctctaccctgctgaccttgtggctctgagcttgtattttcatcaggaaatacggttctctgctgactatatcagttactaaagggattcttaaatctctgagttactgctgaagaacacttagaattctaaatttgtaattatgatacctctaaaaacaagcgtgattatccattatgtataaggatgccttccaaaaagttggagcaacttgaagccacttgttacattgtcatttagtggaggagggagtgaacttggtgtttacaggtagaactctctatcaggtgctgtgaggaaaaacaaaagcaagataaactgtggccataatctttgttactttatttcccaatggggagaaaaagacaaatatatatatttgtcaaaactgaacagatgttatttgaacattatactgtatatgccattataactataatgtatataatacatatatataaattattgaacactaaaaagaacactttaagaattatctattttattttttttattatactttaagttttagcattaggagaagtatctattttaaataaagctatttcactcttcagtttccatctcaagaactcataccaatttaaacttccactcatatttgagagttgagaaaaattaccaaatgataataatatattatctaaaaaataatttaaagatgcatgtctctaacaaaactatgtaacattctgaagggttttaagtaatacttcatatatcctaattcagaataaacttagatgttatcagtatgaaaatatatcataaagtaacatgattctctccaatgaagatgtaatcatccaaactttatgcgttgaatttacggcttagaaatgccatagcaatatgtcctcttgaatatacaattctatatactgagatttcacttagtatattaagttctgtatcactgaagagtatattatgattctaattaacaaatacaattctattttatataagtacccctatcatctactaggcaaagttagctgatgttactatgcatttttttgtcagctgtactcaacttataataactttgtattccaaatacttcaaaattgccatatgcttactgttttcctattcacatcattttcccccctattcttcctgaccctcctttgagcaatagtgtcagtgggattagactcatgcattcacatactgaatgaatgaatcagtatgtgattcatgatatagaaaatttaaattccttatatatttcatatatcatatatatgatatatgtatctgtgcatataggggatattaaacacttctctgtatatatctgacatatattttgaaaaggaaacaccgtagggccaagttaactgcttcaattattacttagtgtaaatgcattcagtttgttctgtaatttcaaaatgatacatataaaaaagtagagtttgcatgtttaatacatctgaagctacagtttccaaattctgaacactttggtgacccccttgacacaatgaatatttggcagttaccgaacataacagggcacaaataatatagttaatgaaaacatccataattatttaaattaggctattttaagaaaagttttaatttgaacattaaacagcttaaaatcatttataataattgattatgtaacatgctggtcattaaaatgagattggtattctctttttttttttttttttttttttttttttccgaggtggagtcttgctccatcacccaggctggagtgcagtgctgcgatctcagctcactgcagcctccgcctcctgggttcaagggattctcctgcctcagactgccaagtagctaggattactggtgcccaccaccacacccggctaatttttgtatttttagtagagacagggtttcaccatgttgaccaggctggtctcaaactcctgacctcaagtgatccgtcagcctcagcatccgaaagtgctgggattacaggcgtgagccaccatgcctggccaagattggtattcttgacattaataattttggtaagcattaagaaggcaaaacatggaagcactcacaataatgtataggatccaagtaaaattctccttactgaaacatgaaactacaaagccatgtgcgcatacttttaatttttaagatttgtttgaaggaacttttgtgaatgacaagtagagaaagtgtggatagatagcatctctgtctttaaaattatttgatgaaataggtgataagaaacacaaaaattaataattcatgtgacctttattacaatacgtcttctggtattagcatagtaataagtattagtgatttacataattggagagataacacaaatacaaattatgcacacacacatacatacatacacgttcctgtgcttcactcaaaactgaacagatgttatttggacattgtactgtgtatgccattgtaactaaagtccaatttgttagagatagtattgttattttattatctttagtatcttcaatgagtccattatgaatagtagcattaactttgcttatgactagcttaaatagaactttggactccataaaaatacgaacaaagatttttaatggctttagaatacagaagtaatctggtaaaagtattcttgattttaatagaaaccaaacaatcaatgtgcccgttagattaacagtgaataatcagattgttccagctcttcactaatgaacaatgctgaaacaacattctctgtaggtctcctcagatagacatatgagaacacctagaagtggaattgttacctcattagagtattcacatttttaattttatcatatattgcaaattgcttttccaccagcagcaagaagtggcaggaatttattattttaatttgcatatccctggttgaacaagttttcaagtttgttggacagatttttccttctgtgagttgactcttcatatatttaccccaattttccgttggattgtttactttctcttaccgattaatatgagttgtctgtatattctagattctagtagagttctggattatatgcacctaatatataagtctacaattccttatccaaaatcttatcgttgacttttcaggagactagtgaaaatggctacttagtggaacatatggaaatcatgagttataagtgtataaaggctaagtgcaacagtctaaagacctggtatcacagatgaagactgacatattgagtaaaccaggaattggctttattacataatgtgtcctttttcttgatttcagaaacccatatatttgctgtttcctgtacatgtttaggaagagtattcagaagagagaatgcagatatattgttgctgtttttttttaaaaaaatacgagtttaattcaattacccatttgattgcttgagtttattagttatggtagcacttagaaagagttgttttagataatgactatgattttggtacagaacctaatagtaaaaacaaaacatctttaattttatttaaagtgcatgtcagtcatgaagtcagaattgaattgctcttttctttgcttttaatgaaaattagcctaatggctgttttatctttaaaaagcaacttctagtgtttaataataacagatttaagtaaatattctgttaagacttaaagaaccatgtccaattactatatggataataacttagagatgctctatattggtttaaaataatgcaaatatcactggccactattcagagatatgtcaaaatcacttttgtttaatatgtgcctttctagtccttagatctactgtattccctaatccttttggggtatataatccagagatattaggacccattcagccagaaactgaaacatgccatgatggttagaattcatcagaaccacactcaaatgaatgttaagagacatagcgtgataaaagtgcatctgaaagagtatatgaacagatgacattacatacaatgttgtatataagagaaaggaaggaaagacattcatatcatgtcatattaattcatgtacactgaaaatacagaccgtgaacagacattctttcatttgttccttcatgtattcaataatagaatgcttctctaccacagatgattccaggggaatttggcaattgctggagatatttgtggttgtcacacatgggggaggagaaagtgctactggcatcttgtgcatagtgaccaggcatgctgcaaaacaccctgcagtacacagggtagctcccgacaagaaataattatccagtcccaaatggcaatagggctgaagctgagaaaccctgattgaaactcacattacatcctaatcgaaactactttgttccgttctgagccgtaggattcatcaaataaaacctactttttattggtacaatatttaaatccagagaccctgtagcatagtaattatgtatgcaggatttgcctcagaaagactagggttcaaatctcagattcaccatatgttaggttgtgccctaggcaagtttctgacctttcgtgactctagttttttaatctgaaaaaatggtaatagtattgctgagaggctctgcaatggagattgagattaattaagatgatttatgttaagtgcatagcagagtgtttgcacttagtcagtttccaacaaatggtagcagtattacctttacatgtactaaatcatttcatcctgacctactatgaaaagcctgatcactttccatattttactgtttttaagataccattgattagagtatgcattgttattttatttttcaccaagaaaaatgtgctgccgttttagactatgacacgctatcatttataaaacgtgtcccaatttcagagcagctaacctgttgaaataaaatgtgagtcttataattgattattgtaaaacacaacagtaagtcttctttgattaggtgcaactgaacaatactatgaccacattcagtagcaaaggcacttagaaggatataggaatatagcttagcaggaaggtagcatcgggtatctctctttagtaggatgagtatgcgtagcaatctctgaagcacccagggagccatccaagagctattcactttgcagcacctgtccactctctcatgacatctcaggtgcacaggaaggaaacaaatcgagatgctgggtcaaccctggcctagaagccttatgcatcccagaggccaatgccttgtaacatagtttccaaggtcctcaaaaaggacatgcttagttacaagaattgttgtacttggggacgccccacaattatggttttccattaggtatttatagttcatatgtagaacacctaaccaaggtgtaatttaccagtccccatcatttttttttttaatctgaagcaatgttgcctgctcacacatttgacattccaactttatcagttttctagggagaagggagctagaaagttgatcaaagtacaaattctcatacagatggacaaagggtgtttttaaccctttactcacagtaatatctgttagtttcatttattttatatttaaagatactgaaacctgaaacttagagcagttaaatgacttgccccaactcatgggctaataagcctagaacccagatgttcttatttctagactgattatttccaacaacactgtaatatcctaaagcaagagtcagcaaactatggtccaagggccacatttagtcctccacctattttcagaaataaagagttattggaacacagccacatttatttgttcatgtattagacctgactactttcatgccacattggcagaatttgagtttggcccacaaagtctaaaatatttactatatggtgttttatagaaaatgtttgctaacctctgctctaaagtataattacaaattggccaggtgcagtggctcacacctgtaatcccagcactttgagaggccgaaatgggtggatcacttgaggccaggagttcgagacgagcctggccaacatggcaaaaccccgtctgtactaaaaacacaaaaattagccaggcttggtggtgcatgcctgtaatctcagctactctggaggctgaggcacaagaaccgcttgagctggggaggcagaggttgcagtgagccgagatcatgccactgcactccagcctgggcgacagagcgagactgtgtcaaaatagtaaataaataaacaaataaattctaattataaattgtttaactctttctatgagtctatataaggagtttatagaaaagcatttgtttctaatgtttgattattaaaaatacccctgtattttttattttattttaattgacaaataataagtacatatatttatgaggtacaatgtgatgttttgatatatgtttacattgtggaataattatgcatacttgaaggattttagagccacagagcctgaacctaaccgtttctctacatcagtgttggccaacttttttctttaaaaggccaaatagaaaaatttcagtcagtttttgaggcttcatgggccatttggtctctgttggaaatagtcaattcatgctaggattggaacctagataaccagactcaagagcccatactcttcaccagtaaggacttaggaaggcagcaagacctgggagtaccagtttaaatgaatgttcttctaagcagtgtcctgtgctgctattaaaccagaccagagctttggcccttagttaagaactgtatgtataaagttttccaaaataatggcttcaggttttcacaaagtccttccatccaaacaatgcagattgtacccccttaagaatctgttcttaactgccatctgttctctgcattcttaaagtctaatcttaatacagcagccagaatgatctgtttaaaaataagtcagatcacatcactcctctgctgaaaactctcctatgcttcctaatctcactcaggataacagccaagatccttccaaagatgcaggacctatcctcctccatccccaactctatgactatcattcctactactctccccttgctcactagattccactcaccctggtgtccttttttttttaattgaacatacacatacactcctgccccagggcctttgcacttgctgtctctgcacagattgttctttcctgagatagctacttgaatcgttccctcacttccttcagatctttatttaaataccacctactcagtgaggctttccctgcaggcactttctaaactctccacatgccacctccctttgccccatacctaagtctcttattcctatccagtgctttacattttgttctttagcacttttcactctccaaagcaccttaatttctcttttactacacattatcaccattagaatgtaagttttatgaggacacaaaaagtttgtctgttttattcgctgttacatatctagtacctcaaacaatgtttagcagacaataagtaatctgtcaatatttatggaatgactcaagtgattttttggaagagttttggtaatatttcatttgccaaaagaattctgccaaaaagactttgaaacccccactttaaggtggagagcttccatagaggcttctggatgttacttgatggtcacacctatgcccactctttcactggccttgaacatttcaagtatgcagcttagtagattatatcttcacagtttcacaacactttccagtttaaaaatcaatgctgcattatgctttgtatatttggacagattatttttgaaatccataaatctctaagttttttttttttaagtctccctttggtgagctgcccttgattagttcaaaatgggaagagagaacctgtcattctttgtcaatcaggttggcacgtacttgacagcatgcagttatagtgaaagagagctgtgttgcagtggtctagcaaacctaattgtagttaagtaaaagaacagtcacccaacatgagaggaaagacaaagaaactcaactgaacaatgttgtgtttttccatccatcagccttcatttgtcagagtctgactgacaatctggactgcagaaatcaggctctaacacaatattgattccatttcatattttgtttcttgctacactttttagcaaacagtttctgtatggaatgagagatagtgcagtcaatatatgcgaccagggcacatttatattaaaggcttactttggtttttttgtcccagaaatcacatattgtttgtttgttttactataatattgtaattgtcagctcttgctgcagtaacaaacaatgacaaaattccagtgacatataacaacaaacatttattactcactcatgtgtctgcagatcagctgcagctttactccacactatgaatcaagttaaggtcttttcattctagaatatggatctgctctaaatgtcttctcatcccaggaccctagcggaaagagcagcttttatatggcatattattctctcatgatggaagataagaacaaggggaaccagcaaatcttgaactgcctttaaagttccagctaagagctgccacacagtcccttctgtctgtccatggtctattggtcaaaggtacacagtcaagcccaaagtcaatgggaagggaagtatattcactgcagggcagccatattaagagaggaaatgaataataatgaactgacaaatcaaccatagtatccacaaatgtcttaggatttcattgattcccaaatgcattttttagtatttcaacacctctgaacttgagatatatcgtacaatagataatgtttacaaagtgtaggtttttttgttttttggctttcttagtttacataacaatagtggcccttatcatcaatgatagattagatagaaaaactgttaattgtggggttgacaaaatagccaaatggtagaaggcactccttataagtaagtaagttatgagtgggagctaagtgatgagaacacatggacacatacaggggaacaacacacaatggggcctatcagagggtggaggttgggcggagggagagaaccagaaaaaataactaatgggtactaggcttaatatctgggtgacaacataatctgtacaacaggccctcatgacacaagtttacctatgtaacaaacttgcacgtgtacttaaaataaaagttaaaaaaaattaagtgaatggacacttaatgtttacaaaaaagttgtcatttttatcttgaatttcttttttctgtagcaatatttatatctcattcagatcagcttatttgattagaaaaccaagcattaatagtagatcttatgtctatttattcacatattcatataccttcatttataaatatatattcatatatatttagaagatcaattggaaaacataagtgccattcccttatttaaaactcttgtagcttctccactacagttctgagggtggtatacaagatccttcttttctctggcttttgctttctatttctactccattacttcccattcccctacgtgatagctccgtacttcttctgcttcctgtctttgcatgttccatgttccctcttggaatacattctctctgccgtccatccccttataatgaggtgcatgagctgtttctgctcccagcctttctgtcctgaccttcttgtctatcaaacacaaaagtgatcagttcctgctctgtgctccattatacattgcactttactagttgttatacctgacctgctctaaatgtagtatatatttgtgtgtctgcactccccattcctaccccagtgaaacatagtaagcactgaataaatgtttgtcgaatgagcaaataaataaataaataaataaataaatgtttgaacatacatggaaaggttgtttatgtcctccttataatgtgctttgagatatatattcttaatatatatataatcatatattctaaggttattagtaggtaaaatgaaaatttaaagaaattgagtacaagaaaggaaaacaaggaagaattttttcctttttgtactatttctaagaacaccaaatttctagttaaacacacgcacacacaatcggcatgatgtagaattagaaatatgttgaataaatcaattattagaaaatgtaaatatatattaatttgcctctgacttgctacttttaccctcaagggttttttttttctacctcttttcatcactaatctttgcttcactgcttgtcagatcagcaactgcccattattagtaatgccatttaataagagataaataaaagtaaaggtgcttagagttactccatttcaaaaacctatcagggctggatttcagaagagaccatgaaattctcctactgttattgaaccattactccctattacctaattaatacaagttattttcttaaaattatacctgacattgtagtgaactatcaatactatgaagaaaatcaaactctcctcgtatcataaggatcttaacacctggtacacaatcttgcattggaggggacattaagaataaggcatggaggaaaaaaaaaccttaatggaaatgttctgttattagaaatgagactttttggtggaaatcccatgacgactttcttgtctgaatgttctttgaagttgaacactttctccttacacaagccggccactataattagctatgtttccattttagtggtggccttcttcaccttatctgaaatcatataaagatgtgaggccatttgcgagataaaaggtttgctcaaaccagttctctgacctggatatcagaggtttggcaatcataaacccactaagagaaaccctcagagctattacaaggctatgtaaaactttatttcattttttgtgagaagggacaggattttctctcatttatattctggaagaatattgtagaatgtatttgagttcaagaggaggagaaataattaacataatattaagaaacgtcaattttggaaagaaataataagcatatatgcacatgtgcgtgtatgcacacacacacacagtatacacaacagattcagaaagaaggaaatagagatttggtgacacatacttcctggatataatctcaactctgccatttgcaagccacatggtcttggataattgacctaatctctctcaattgcagcatctgtgaaattagataaaactttctttgtaggagtgtatgtgtgtatgaaaagcacagtgtttgacatataataaatgttttagcaactgtagcttgttaatattatcacagcagttaatatcactatagcagttagttgccattttcagcacagctaataattttagtagcattttctgatctttccatctcatgtggtttctttggagttgtttcttgctttgttttttagcttttctatgtcacattttatttgcatggagaaataacaaattttacaatttatttcacatattctttaatttttaggataattgtcagtttcttacagtttattttccttatactcactgaagaaaatatgtacgaaagaatattttcagtgaagttaattggatttactacagttgacccttcaagcaatagtatcttgcccttaataactgacctatctttgaactaataaattcaacctgcaaataaatgtagtgaggtaaattgtagaaatttatcttcaaaatggtctttctaaagtgatctatcaaaggtgcatttaattagaggtccagttctccaaaaatgtgccaaggaaaagtagccacaaagaatttagagctgaaatgaattctttcacccattgctctgtttctatagaactgagaataaatctcatatgggtacttaaaatctgtactatgtcattgaaggatgaaaagatgacaatagtgatgatagaaggacacggtaataggaaacatttcaatagagggaaatgatgtgagtatgcaatgttcattcaccagaggactaaatctagggctattttggtgacttgaacagggaatattctacttcctgcaagtgaaaaatatggacatttcatttggcatgccacctgctcttcagtccatcatgtagcaagcacccacttagtactttggagctctaagtaatacttggactactcaaatgccagccttgttgccatttctgtttattcgccaataacaattttattaattaaaatttgtatgtggatgtcttaaggaaattccttgtagttgtcaaagcagactcctgatcctatctatctgccagtgccttctgagtagtggtatctattcttcatgatttttggaactatttatgggtgattgaagaatatggagtggatagagaaggatgctagtcatttggctgcacacaagaaacacagatgaaatttttgactatttctgttcattttctaaaggtacagaattttcactggattgtacttgtaagcaattttaaaggaagaaatatccagccttttgaatttgttacagtgttgcaagacttttttaaaatgttaagaatttttatcatataggatgaattaatactctcataattttaggtttgtttcttccataattaataactatccttaaagattgtgtgtgtgtgtgtgtgtgtgtgtgtgtgtgtgtgtatttcttgattttccagagcaaacgttcccattcatttgttttactcaccttgttatagttgctcccattgtaagatatatctagtaagtttactgttgttacctaaatctgtttgctgaattttaaaaatgggaacatgtagtaaatttgggggaccacgagctagtatttacaaagtaaaccgagaacattggatataaaaccttatttcatttaacctccaatgaaggatatattcagtattattatttgtattatttcttgagcttccttgcttatctgtaatatgtaacatggtggcaccccttttcatataattctctcctcacttctattttgggtttttacatgttcttgtttcagtctcttctgctctttctatcttttcttggttcaactttcttctcttatcctgtggaggcgaatacctaattctggctctatcctcttcagtcactctacaagtatcactgggacaatattgtccaactactatttttacctccaaacctgtattcttagccttacccctaatctgcacactacgcttctttttgcaattactttctgtacatttgcatcagtgttaatcacaggcatcttgactcatgtctccaacctgaaaacattattccttccatatagggacaggctcctctgtcttccctgtacccctagacagtttctcccaagttataaaatcttggtgattctgaaaattttctttttccccatcaagtcctgccagtcctttatccacaacataggaataatacttcctgaacatccgtgctgctcctgtttgttcaataagtactcggacctctaaaggcatttcctatgtttcttccaccagccccttatccttaaaatcttgcctccaatctgccgctagagttatcatcttaaaagagtcaaatcagggttggtatccaagaaatattacaaagtactaagctcttggtatatacaatcaacttgagagaaagagagggacgggaggagagggagagagagagagagagagagagagagagagagagagagagagagagagactttattctgtcctctataacacctgaatgattctgtacatatttatgttaacagagcattgtactacttcaaatccttatacaagcaaaactcctcaccgccttttggcaatggaacttgcttttccctctgcctgaaatagtcttcagtatgttgacatgactcatttcttcacttcattccatttcctgaagagaggagcagtcttctgtgctcacattgcctaaaatagagcccactgtcactctctacttactctttttaatctttcttcatagcatacatatacatatatatacacacatatacatatatatacacacatatacatatatatatatatatgtatacacatatacaggcatacctctgagacactgaaggttcagttccagaccaccataataaagtgagtcacatgaactttttggtttcctggtacatatagaagtcaggtgtacactacactgtaatctattaagtatacaatagtgtatgcctaaaaactaatgtacatgccttaatttaaaaatatgttattgcagtgttcaagctgagagccaaatcaagaatgcaaactatttacaataaccacaaaaaataaaatatctaggaatacatctaaccaaagaagtgaaagatctctacagggctaactacaaaacactgctgaaagaaaccatagataacacaaacaaatggagaaacattccatgttaatggaaaggaagaatcaatatcattaaaatggacatactgcttaaagcaatctacagattcaatgctattcctatcaaactagcaatgtcatttttcacagaattataaaaaactatcctaaaattcatatgaatctaaaaaacagtctgaagagtaaaaacaatgctaagtgaaaagaataaagcatgatattaaccaacttcaaactatactataaggctacagttacccaaagagaatgggacttctacaaaaacagaaacttggaccagtagaacagaatagagaactcagaaataaagccgcatacctacagccatctgatctttaacaaagtaaacaaaaaaaaaaaaaatggggaaaggactccctactcaataaacggtgctgggatagctggctaaccgtatccagaggaatgaaactggactcctacctttcactatatacaaaaattaactcaagatggattaaagatttaaaaaaataaaatctcagccaggtgcggtggctcacgcctgtaatcccagcactttgggaggctgaagcaggtggatcacgaggtcaggagattgacaccatcctggccaacatggtgaaaccccgtctctactaaaaatacaaaaaaattagctgggcatgctggcgcatccctgtaatcccagctacttgggaggctgaggcaggagaaccgcttgagccagggagtcggaggttgcagtgagcccagattgcactgcgccactgcacttcagcctgacaacagagcgagactccgtccctaaataaatacaatacaatacaataaaatctcaaactagaagaatcgcagaagaaaacctaggaaatactattctggacatcagccttcagaaagaattcatgactaagtccttaaaagcaaatgtaacaaaaccaaaaattaacaagtgggatctaattaaactaaagagcttctacacagcaaaagaaactatcaacagagtaaacagacaacccacaagatgagagaaaatatacacaaactatccatcagacaaagatctaatatccataatctatagggaacttaacaagcaaaacgcagataaccccatgtaaaaagtgggcaaaagacatgaatatatagatacttctcaaaagaagacaaacgggtggctaacagatatgaaaaaatgctccacatcactcatcattagagaaatgcaaatcaaaaccacaatgagataccatctcacaccagtcagaatgcctattatcaaaaactcaaaacacaatagatgttggtgaggctgcagagaaaagggaacattatacgctgttggtgggagtgtacattagttcacccactgtggaaagcagtttggggatttctcaacttaaaatgcactgtcattcaacccagcaatcccattactgagtatatatccaaaagtaaataaatcattctaccaaaaagacacatgcacttgtatgttcactgcagcactattcacaatagaaaagccaaggaatcaacctagatgaccatcaatggtggactggatgaagaaaatgtggtacacatacaatatgaaatactacacaaccattaaaaagaatgaaattatgtcctttgtagcaacatgcatgcaactggaggccattatcgtaaatgaattagtaggaacagaaaaccaaataccactttgttctcacttataagtgggcctaaacattgggcactcatggacataaagatggcaacagtacatactggaaactagtaggggaagagataaggaaggggcaagagttgaaaaactaactattagatacggtgcgcactatctcagtgacaggatccatcatactccaaacctcagtatcacccaataaatatataaatgtaacaaacctgcacatgtaccccttaaatctaaaacaatagttgaaattatttaaaaaaatactttgttgctaaagcttgctagcagtcatctgagccttcaatgagtcttaatctttttgctgatggagggtcttgccttgacggagatagctgctgaccgatcagagtagtaactgttgaaaggttggagtgactatgccaatttcttagaataaaacaaccatgaggtttgctatgttggttgatttttttcacaaaagatttttatgtagtgtgtgatgttatttgataacattttacccacagtagatctttcaaaaatgaggtcaaggctctcataccctgctgctgctttaccaactaagtttacagaatattctaaaccctttgttgtcatttcaacattgtttacagcgtcttcaccaggagtagattctgtctcatgaaaacactttgttttgctcatctataagtagcaactcttcatccattgaagtttcattatgagatgacggccattcagttacaccttcaggctccactttattctagttctcttgcaattttctccacatccagtgacttcccctactaaagtcttggaccctcataggcattcatgagggttggaataaacttcttccaaacaccttgtaatgttgatatttacctctttctatgaatcacaaattttcttaatggcatctggaatggtgagtcctttccagaagattttcagtttacccagatccatcagaggaatcgctacctagggcagctatagccttacaaaatgtactttttaaagaataagacttgagagctgaaatgactcctttgtccaaggactgcagaatggatgttgtgttagcaggcataaaaacaaaatctcttggtacatcttcatcagacctcttggctgaccaggtgcattatcaacaagcagtaatatattgaaagagattttttcttctgtgcaataggtatggccagtgggcctaaaatattcagtaagtaaaccatgctgtaaagagatgtgctatcatccaggctttgttgttccctttatagagcataggcagagtctattagcataatcttaagggccctaggatttttggaatagtaaatgagcattgtcttcaattgaaagtcatcaattgcattagcccctcaaaagagagtcagcctgtcctttgaactttcgaagccaggcattgacttctctctagctatgaaagtcctagatggcatctttttccaatagaagactgcttcatctacactgaaaatctgttgtttagtgtagctaccttcatcatcttagatattagcttgatcttctggatagtttgctgcagcttctccatcagcacttgttgctccacctttcacttttatgttacggagagggcttcgtcctaaagcctcatgaacaaacctctgctggcttccaacttttcttctacaatttcctcacctctctcagcattcatacaactgaacagaattgggccttgctctggattaggctttggcttaggagaatgttgtggctgttttgatcttctgtccagaccactaagacattctccatattaacaataaggctgttctgctttgttatcatttgcatgttcactagactggcacttttaattttcttcaagaatttttcctttgcattcacaacttagctaacgggcacaagaggcctagcttccagcctctcttggctttcgacatgccttcctaaccaagcttaatcatttctagcttttgatttaaagtgagagacatgcaactcttgttttcccttgaacatttagaggccatagtacggttattaactggcataatttcaatattgttgtgtctcagaatagggaggcccaaggagaggaagagaggtagggggatgactggtcagtggagcgttcagaatacatacattaatggattaagtttgccatcctatatgggcactgtttgtggcaccctgaaactattaaaatagtaacatcaaagattactgattacccatcaccataacagttataaaaatattgaaaaagcttgaaatattgtgagaattatcaaattgtgacacagagacatgaagtaagcacatggtgttggaaatgttgctgatagacttgcttgatgcagggttgctacaaaccttcagtttgtaaaaaaaaaaaaaaaaaaaaagcagtatctgcagagccaataaggcaaaactcagtaaaatgaggtatacctgtacatatacatacatgtgtctatatatccactcacacatatgtgtatgtgtattatatgtgcatattatacatatatgttgatatgtgtatttatcatatctaatacacatatatgtatatacatgtatatcacacacatatattcatattgtaaattgaaaattttctagtgctgtatcccaatctctagcttataaatatattgaatagatgatgcagcaggtatcttttgaatacgcactccaattttagaaatataaatcttttttaaaggttggaataatataagtagtttggtgttcagtgcaaaaggttttaatgtataaatactatgaaaacaaaagttagatcaaatgtatcaaatacaaatgatctgtattgggggacagagggacacattaaatttaagggaatatgaggagaatattgacttcctatgctcgatgagtgaaaaagaaaagtgaagtgggagtgtttgaaaggaaagatgagcttttccatgctagtacatcacaggttttaatactcatagaagtttttagatttgtataggaaatatgatcctccagcctttccaagtttactcttctactggaattacaaatcaaaactaataaatgtttactatgcttcaagtgcaatagttataaagtacctgattagaggtcccacattcagatgttggttatataaaatattcatgctaaatcatataaatgctaaaacatttgtatttgtgatgttctcttggattgctagatggagattaaattatacaaattcagctaagaagaaaaatgtgggataaatggaattttagtttaaaggaagtcaatgaaaggattaattaagtataaaataatcccattttaatttgtcatagaaatgagttttctgagacattgttgtaatcaataacgtgaagatgtaaaattttgcaaaaaaaatcattacgggaaatccaaaagcagaagagtagactctgtatttaactctagcagattatttagaaagaaaatagtctatgccatgaacctttcgactgtctgcgtgaacaaatgtctctagtaatacacactcttaactcaattcccataggctcaaagttgcaacagtatttatttgcccgttcaacggttttttgtttagcacttactatgtgttaggcacttccagggatatgagtgaacaaggtagttatgggtcttactctcatagaggataattctttaggaatggtcaaaactatacatatacacataatgtgattaattgtgatgtgttttgaaggaggaagcaaaggagttggaacagtttaaataagactgtaggttggcagtgggaacaatggtctttgctatcatttttcaaaaattccaatgaatgggaatgacgactgttgcattaagttgcctgtctccctctgacccatagtgattctctattatcagagaggtagggcatgtttttcagcatatgtgataatatcaaacagattcagatggtgaaagtaaaatttcttaatgcttagaaataacataatttgatcaaatcatttggatatgttattaagttgttgtaagatatgaagacgtagctgttactactgccaatagtataaactttggattcagacctagctgtgtttgaatattaactctcccacatcccacgaggttgtgggcaagctattcacatcattgtcactaccgtcactactatcccacccacccttgcttcattttcttatctgtaaagtggcaatctgttggaatcagggttggggaaggcaaatagtagtcattatacgaatggtaactatgctatcatcaataatatagtctacagctatgatgaagctaatcagaaaacattgtctattaccagtaattagctatatcaataactatcacaagaaaagtcccagctgtcagtgaataaatagaaaatagtgctttgtcttagagaaacacatacaaaatgaatggtggtgacagtgctttaagttaacttgtcagtttatatgtgtaatgcatatataatttcaaatgtataatttagacattgtacatgtatatttggcctggtaatttatggtatacataaatgataaatgtataggttgaaaattcagttactttttttccttttcttaaatcatttttaccttgctgaagatatgctcttttctctacttccttagaataatatattttattttctcttaaagtattttgagaccatatcaccatttactacaccaaaatgtttttttgcaaatgcggtattcaagggtgaatttatagtggctggggacctatttggaattcagtaagtaaaactagattttccttattcctcatctgagatcagagctatttctacctctagcaaagacatacagtcattccgggtgctgcattttcagggaacaatgtgttttcttggcaaggggcagtaagaccatcaattaatagttcttcatgtaaagtagctaaactactgttataaaggaagtgaaatttgcatacataaccattaacacatgaggttagttatgtacaattttgaccaaagtgcctgtttgctgctggtatttattataataagaactggaaaaaaatagtctatctcaagagcatgtgctgagcacccgtaaattgcaagagactgtactgggcagtatgagattatagtaatttgggatttcctactaatgaactgagagggaacaggtacaaacacagtatacgaaggaaacagtggcacggagacacttaaacacagcagtgctgggaggctccggggtaggggagggaggaagagagatacgggttaatcaggagctgctctctggggaagattgcccaggccctgactgatgcctgacattgattaattgatactctatcctagtgtttaacaagtgttccatccaaaaagtcttctgtaatatttaacttcacttccttcagcttcaatttctgcacaattcttttgtcgtctcatcaagagagctagtcagcagacagtaacaaaatgcttatattcatatacctgaaggatttttttttgtcatgcttcagccttctccagactgaagaaaagcaaataataaacaaaattaatcgttcttcagaaggcctgtttgactcattaataaataataagctttgatactgtgctttaagtgtttaccctttggaaagaaaataattttgacagtgatgtagaaataattatttgatatttatttcaaaacaaaatttatatccaatactaaacacagaattttgtaaaacaataagtgtataaagtaaaatgaacattaggattattgagattattgtagctaaaactagtgtttattcatataaattatgttaataaattgtattgtcattattgcattttacttttttgaaaagtagttaatgcctgtgtttctatatgagtattatataattcaagaagatattggatgaattttttttaagtttaatgtgtttcacatctctgtttcttttctctgcaccaaaagctacatttttgtgcccttatgtaccaggcagaaattgatctgcaatacatgtggagtctccaagggtatatttaaatttagtaattttattgctaactgtgaagttaatctgcactatatgggttcttttccccaggaaactgaaatagcagttcaagctaaacaaccggatgtggaagagattttgtctaaagggcagcatttgtacaaggaaaaaccagccactcagccagtgaaggtaatgaagcaacctctagcaatatccattacctcataatgggttatgcttcccctgttgtacatttgccattgacgtggactatttataatcagtgaaataacttgtaaggaaatactggccatactgtaatagcagaggcaaagctgtctttttgatcagcatatcctatttatatattgtgatcttaaggctattaacgagtcattgctttaaaggactcatttctgtcctggtgtgctgccatcaatacaaaagtagtcccaccttcaaggtagattaaattctttggggctttattgctttgcttgccagccttgatgcttttcatattgtttggtttaattcaaatcaagctactgcatcatagtgtctgtctccaacagctgtaaagaatcacaatatggtccgtgacctttcttttctttgttgctctttcttataaaagagtaaaatcggcattgaggcttcagtattttattgggtcaagaatttttagtgaaatgtcatgtaattgcttatttctttggcaaaaagctggcctgggataaacctttctacttttttttcttctccatatccatgttgaagtctaggtcacatttattcacaggctattacataaggagggagatggaaagccaggtcagttttcaaaaaatagctaatcaatggcttccatttgcaaatgagagtccagtgctaaatatacgttagcagtaggttacctgattctctgtacctgaccagaattataatggctcccattatgatgaaggttcctgagatcctgtaatcatggctgtttattgatcagtcttggtttctcagttaatgttgcaggcttggatacaatgaacctcgtcctcatgtttaaaactgcttgaaaacagttcaggtcaataacctcattatacagaaccagtttgtccttgcaaacaacattaccatgacttagattctgtctctaaggtcgctgcttagtttcccttgcgcttggcccaagcttcatttctagaagattgtttgttttccttacagcttacaagagacttttccttaggtagagttgaagtttgcacctgagcttaatgtccaaacaccagacactgaaaatcacaggtttctctgtagatatcaacatacttttattcagaaatatattgcaaccactccaaaaatctagaaaagtagtttgtatccagttcaagcccagtataatcatttttcataagctaacaatgtgctcagtatttagttggaagagctaggcaaagtcctgaaagcagcaaatttcagagtttccgttgatgttctgaagaaagccagccctcagagcagttaatatggtgactttcattgtagcaagccatgcagtgcacaaatggacaattgcatacgtttctatctactctttgttgatcctcaaagactttatgccttatggtgtatgactatgaattaaggtttgtcactaattgttagagatcacaaaggtacatgtaatttggcttttacttttgtgcctttgtaaaagagagagagagagatcttaattaaaagccactgagaaaatttttgctttcattatgtataaaacaatccaaatgcttgatgctaacttatcgcacctccacccacacactcaactactgggccacttggagatcagaactgggatctgccatgcctgagcatatctgcttcctgctgatgcattagtgatgtaaaaggagaattacttttctgaaataaaaagaaagaaccaggagctgttgctttccttctctttcacaacccttaaaaccatttttgtagcagacagcactgtttttttccttcctttttttttttctccttccctgtttccctattttctctcaatttgacacattgggagaagctgaacttaagggaaaatttattcctgtcttcccatttctcccttggatttggagaaaaatcaacatatcaagttggctgggcatggtggctcatgcctataatcccagcactttgcgaggccgaggcaggcggatcacctgaggtcaggagttcgagacctgcctggccaacatggtgaaaccctgtctctactaaaaatatgaaaatgagccagctgtggtggcaggcgcctgtaatcccagctacttgggaggctgaggcaggagaatcacttgaacccgagaggcagaagttgcagtgagccgagatcgcgctgttgcactccagcctgggcgacacgagcgaaactccgtctcaaaatatatatatatcaagttgataggggcaaaaatgcaagaatgatttgagaattatggggtttaaaaaaatagttgactcacgcacaacttttgctgtggaccatgaccttggaaacatctgaagattagctggggtttgcggtagcctgaaacacctagaggctcaaaaaatgacctcacagttttgaacatgacacccagcaatacaaggcagaaagctgtgagggctgtttaaatctctgcatggatcaaaaatttatttttaaaggttagagatgatttttctgaaggacactccattgctctgatagaacgtgaacaaagcctttttaaactttgagtccatatatcaaaatttaaaatttgtcctatttataatgcctcttcttcactctgggtcttgttacctcttaatagaagaggaaatgagtctgagtagcctgcagcacattttcatgagagaattgtgtttctgtttttgttttttgggggaggtgcatttggaaactgtaataattatgaagaaaatgatattctttaaaaagaaaatgaaaatctctcacgatgtatatgcaagatctagtatttaaatgcataattagtgtgtccaccgcttacaaacattctaattaaagacacatcagggagcaattctgtttcttaggaaattgacttgtctattggcacctccgcattctgcatcagacagcctgtctgtccagctcctacgctcacctcccaagctgagttctgattggaagctgggttcatccctgctcagtttctttcctctttcttctttccttcacttcgtcaacttctttaagatttcttttattttcaaagatggtatatttctggtttcttttttaaaatctctgactaaccaacttctttattttctttgaggacttcctgtaaaaggtcaaatacatattatgaaatgataatactaatgacgtataggtagtactaatctctgctgcaaaataactggaaaaatcttaggatcgtatgatcaaatacctctccatctttgtttagcacttcaactctctttctctctctctgtctctctctctctctctctctctttccctccctccctctccactctctccctctctccctctctccctctctccctctctccctctctccctctctctctctctctctcccccttcctcccccatctacacacatacttttatttatttgtatgttatttcttcatcttaacttcagaaattactgaagactgactatatgagttatataaattgtttaaaattttgctaaagttatagttttggtataatatattacattaatgccatagatgaaatagtctttaatgtgttccatttttccacacagtaataactaggtcctcaatagcaccccatttagcagtttaaaagcagcaaaaacaactgctatcagtaacaacaatataaactacaaaagaagccatttgttatttgatttttattataaaattgtatttttaactgtcttgagcttaagcatttaggtgccattttcttgtattcatactcatttttaacttaagttggaaaactacactttcagttaacttttaaaaatatgtttatgtactttcaatgcttacatcacctgccatgtattagaactgagagcattaatggaattttaaatgtcttggttactttctaaagtgataaaatgaagccagctggtttgctttgctaactttttatattatcaaaaaatgttacttacacaaacctagtaatatgttttacttactgctcttgaattatttttcaatgtaacagaaaaaggtgtgaggaactttctgtatttggccaaagcgttccatcccaacctttaacacaaaataattgctgtagacaaatggtcaagagggcaattataatcttccaggcatcatttcctcagatatgaactgcaaaatgacagcatcattagtcattttcaattacagtcagtcacaaccagggatgattcattttcccagctgttttgttgttaattaactagatgaagctgtttttttttctcccaatgagtttgttctactgccaacatcaacatcttaacatttttaaaaacttccttagggtttattttttgcctaacaatctttaatatattactcacaaaagatgtgcatctcaagatttatccacggtatagcaggtcaaatggtatttcattggtcgaaatgttgccgaaataaatataattacacttaaaacaatacttggatttcataaatcatctgccatgcgtacaatctcatttacctggtgtaacttcacttgtagcaacagaaatcaatagagagataacagacaaaaattgtcccctgaaatgaacaagtctattttgactgactcatttattgagcacaatttccatgccaataacaccagaataagttgggagaggacttctagaaagaagataacaatattagaggcatttaataatttataagtaaatgcatagcaacattttatttttttaaattacaagtttgcgactgggcgcggtggctcgcgcctgtaataccagcactttgggaggccaaggtgggcggatcacaaagtcaggagatcgagaccatcctggctaacatggtgaaaccccatctctactaaaaatacaaaaacaaaattagccgggcttggtggcaggcatctgtagtcccagctactcgggaggctgaggcaggagaatggcatgaacccgggaggcagagcttgcagtgagctgagatcacgccactgcactccagcctgggtgacagagtgagactccatctcataaataaataaataaatacaagtttgctttacaactgaaaaaaaagtcttggagtataagaggttgaataaatgctaatcccaatgcataaacttgaggagagcttcactttcccaatgagaagagaaaaaatttataatagatttttgggcaacttgtaaacataaacatttagaaatatggatgagattgtcaaatgtctaattatattcaatttcttaattgagtagcatttccatatttgcagtcttacattttataaaataacacactcatttagaaatacctggcacatttatattttatgaaacaatttcattcaaacccttcgtatgtatattctagaattgtagagctcatcaccttgctaagttatttgtaatatggcattgtttgaatccctacataatactctgaaagccctctggccaagattacaagcaacatatctgtaatcaaaaaattaagaatatttaccttattgcagcaagagcgtaaaacacttcagagtgtgggcatctcagtaagagggcattggaaaaagcttcttacagagttcagctggctgcatgattctaaggaggaattcagaaagtagaagccatttctggattagatgctttcaagaaacagagtcaatgtagtgattaggtatcttagtgtttatctagaagatgagattaaagtagggctagacacgtcgttggtaaaggagcagcaatgcctcatattagtcatttctgtgatagcagaaaggccttgtctctgtcttgtttcaaacacggccatggggtggccttgtgtctgcctagtttatttctatgagtgttttttaacatccagctgggaccatcatggcctagctagctgccagctgccagctatcagcagagctatttttcacgttctcaatgctgtcgctgaaatttttatcccaaacttcaatacccattcacaaaatattaggaaaactgtttttttcatttttcttagatatgattttggttgtttgtttgtttttgagacggagtttcgctcttgttgcccaggctggagtgcggtggcgcgatctcggctcaccgcaacctacacctcccaggttcaagcgattctcctgcctcagccttccaagtagctgggattacaggcgcccaccaccatgcccagctaattttgtatttttagtagagatggggtttctccacgttggtcaagctggtctcgaactcccgacctcaggtgatcaggctgcctcggcctcccaaagtcctgggattacaggcgtgagccactgcacccagccagatgtgatcttttaaaaattcccaatagactaacatattctttctgctttttaagttgtttggctttttaacaaattctttgaaagactcgtttacaatgatctctgccacgagtgattgtgaagctatacattaggaatgattgctaaagatttatcaactttctttgcctccctttttaattaagcaaattctgtcagaatacttatgtaagcatcacatctcttgaggttatttcaggctaatatacaacattgtggttccgaataaaataattgagacataagagatagtataaagtcttgaatatgagccaactttcttttctgagagaatatttgagtgaaaagtctcatgtactcagtagctcatgctgaaattagggaagcattttagagatttgaatttcacctcttgtcctcagttgtattagttacacttaaagagagagacaaagagacatagatgtttcagttacaatattcgaatgtatgcctgtatatatacagccgtaggtagagtcctttatttattcagtagatattaattgcatgccaaccattgacacaagatatatttttaaattttgaaaatctcaaactcaaatagagtttaaaactatattctagtttacttttttaaacaaatgattttttatgattgtattaaacaaatacattatttttccttacttattctacatcaaataatatctatttctagaaggcttttttccttgtcttaatgatagaaaacataaaaatcatttaatattttttaaatatccaaaaaatatgaggcaagaaagcagccacaattgtagctaccttaggaaacttaattaaaaaatttttttttatttttaattttatatgtgtataattgtacatatttatttgtgcggtacaagttatattttgcttattttttataatttcagtagttttgggggtataggtggtttttggttacatggatgagttctatagtggcgaattctgaaattttttatgtatccatttcctgagtactatatactgtacccaataaatagtcttttatcccttacctcactcccaagctccccacttagagtccccaaagtccattgtatcactccgtatgtctttgtatcctcatagcttagctcccacttacgagtgagaacatatggtatttagttttccgttcctgagttactttacttggaatagtggctgccagctccattcaagttgctgcaaaagagattcttttttatggctgagtaatattccatggtatatagataccacattttctttatccattcattggtcgatggacacttgggttggttccatatcttgcaattgcaaattgtgctgctatttttgtgctgctgctttcttttttgttatttccttttctggttttggtattagggtgatactgacttcatagaatgatttagggaggattccctctttatcttttgaaatagtttcattataattggtaccaattcttctttgaatgtctggtagaattcagctgtgaatccatctggtcctggacttttttttggcaatttttaaattactgatattcaaccttgctgctcgttactggtatgttcagggtttctttcttttttttttttttttttgagatggagttttgctctttcacctaggctttagtgctgtggcatgatcttggctcactgcaacctccaccttccagtttcaagtaattctcctgcctcagcctcccaagtagctgagattacaggtgcccaccaccacgcccagctaatttttgtatttttagtagagtcggagtttcactgtgttggccaggcaggtctcgaactcctgacctagtgatccacctgcctcagcctcccaaagtgctaaaatcacagacgtgagccaccgcgcccagccaaagcgttcagggtttctatttcttcttgatttaaactaggagggttgtgtgtttccaggaatgtatccatttcctctagattttctagtttgtgtgcataaaggtgttcatagtagtagtgaatgatcttttgtatttttgtgatgtaggttgtagtgtttccagtttcatttctacttgagcttatttgaatcttctctcttctttccttggttaatcttgctaatggtctatcaattttgtttatcttttcaaagaactatttgtttcatttatattttgtatttttttgtttcaacttcatttagttctgctttgatctttgttatttcttttcttctgctggatttgagtttagtttgttcttgtttctctagttccttgaaatgtgacattaggttgtcaatttgtgctctttcagaatttttgatgtagtatttaacactatgaactttcctcttagcactgtttttgctgtatctcagaggttttgataaattgtgtcactattaatcatttcaaaaaatattttaatttccatctcaatttcattgttaaccccaaaatcattcaagagcagatttcttaatttccatgtgtttgtatagttttgagggttccttttggagttgatttttagttttattccactgtggtctgagaagatacttgatatgattttgattttcctaaatttattaagactttgtggtctcttgtatgacctgtcttggagaatggtccatctgctgataagaatgtatattctataattgttaggaagaatgttctgtaaatatctgttaagtccatttgttctagggtgtaatttaagtccattgtttctttgttaagtttttgtttcagtgacctgtctagtgctgtaaatggagtattgaagtcccccactattattgcattgctgtctatctcatttcttaggtctagtactattgttttataaagctaggagcaccagtgttaggtgcatataaattgagtactgtagtaaatatcttcttgttggactaatccttttatcattatacaatgtctttctttatcttttatttacggttattgctttaaagcccattttgtctgatataagaatagctactcctgcttgcttttggttcccatttgcatggagtatctttttccgtccttttaccacaagtgatattttgatacaagcatataatatataatgatcaaatcagagtgattgcagtatctatcaccttaaatatttatccattttaaattttaaaaggaaagctatattcagaaatcactttttcttgtaactaattcctgttcttcataaagcagaaatttcatagtttgatatagttgtcttaacatttaatgaatattttcaagcaaagtatatacaatggagaataatgctcagctgcaaaagtcacctataataaatctgatttttccatttacaaacaaaagaattcccaaagtttatccattttggtagaacacgaattcactctgttgagtttggagctcttgtgcggaaaaccttggacctgcaatttagttagcatattcaaagttttaaaattatggagatgtagtcaagaataggacttgataactattatcccactgatacgctatttaaataagttgggatttaagtacttatttgatttccttaaatttgcttatagatgattaacatgtattgcaaattgttaccttttacagatttctattgagcactgcttaaattttattatatgatgaacacctgactagttgctacagccaaacattttttgttatgcaaatgaattttacagcttaattggaatgatgagagaattgaaaatatgggcaaatgccagagaagtgaaaagcaaaatgaagcaaaacaaaaaagaacttgtataatatataaataatccatttcaactctacagtacaccaaactcttgaaaaagtagcaagattgtttttgtgaacagccaaatcaaaaactgtagtcatttcataagtatttgctaataattataaaagattggaaattatacagttctgagcttattgaacctttgacccattgcagtgtcctcagacatttgtgatacattggtagtgccatttaattttaaaaatccacctctacattagagattatagtaacccctcatttacctatctggaaataagagtgggaaagataatattagagtaaatggacagactatttagagtttatgtattaataaaagagaaattgcatgtacaaacatgttattttctaggtaactaaaacctagtcctttaataaagcactgaaaaaaattttatcgtaactattttaatgagaacttttcttgaatatcttctgttttgcttcattgagcagcgcataatatctaaccaacaaatttatagtgctttgtagttcacagcatttttaccatataaaatatctcgtttagtttctccaacaaagctatgagttaggtggtattattatatccatgtttcaaggatgataaatcttagtgacccatctcattttccaaggatcacacaaccagtagtagtgaattaggaacgaaacctaagacttctgattctaaatcacaatgtaaattaacttttcttaattttcaggggtgtcgttatcacatcaatttttgctctgtttagtgatacagtgttatatgaggaacatgaaattcaaagcaccctttcttcagttgagacccagttgaagtggttaatttgcttttagaagctagactgtaagataaatacatacctttaagtattaaagctaactcaaatcactgagatacttacaccatgagaagagagtggaacctaagtcaactggtagaaacatagaaacagcaaactttgatctctctttatcctcattctgaggggcaatatgcttactgagtggaaagatgggcatacccccagcagtatttaaatcaatccctaatctatcactatctctccttttctctctatctcagcacatataggtgatttcctataaattaaatggtgtaggatgagatttcatcccatgttgaaaggtcatttcattgataaatgactaagattaccacatttctcagttttaagtttttcatgttcattgtctcctattgctactttctgttatcagaatgattacttctcattgcttttagtattctgtctttgtagggttacagaaacttcacagggaaaccagaagatcaaatatattactcactagtctcttagaatatttaatttttagtgtttaggttctgatgtcaggacaggaaaatatcttccgtgagtgatgacttccaagggtggttttcctgactaatcagaggcattattttttgtttgcttttgggttcaagactgatttttaataaataaaaaagttacatttattgatatgctagtaaatatttacatcatgcattctggataaaaacattgaaagccttgatttgacttgatgtcagacacaatagacatagtctcaagagcactgatgatagttaaattaggaagtgatgaattcttactatatattatcttttgttcttagcacagtttattttatatttataaaatttaatttatattaatggttatgtttaataaccgattagcaaaattactgaaatgtgacaataatatctctattcctgtttctttcctgctttatccttttaaaatatattatttataagtatattttaaatttataaaagctacattgtgctataaatcttgtttcttagcttttctaacattcataattgtgttttaaagatccacccatggccgggcgcagtggctcatgcctgcaatcccagcacattgggaggccaagatgggcagatcatctgaggtcaggagttcaaggcagcctggccaacatggtgaaatacaaaatacaaaaattacccgggtgtggtggtgcgagcctgtaatcccagctaccgggaggctgaggcaggagaatcacttgaacccaggaggcaaaggttgcagtgagccaagatctcaccactgcattccagccagggcaacaacagtgaaactccatctaaaaaaaaaaaagaaaaaaatccatccacattgctctacatatacccttatccatttctttcacatacatacccatgttggcctcaattccccacaatgcagcaacaaactttcttgtacttccttatgaccttaagaatgtgagagaaacttctccggtatacactggtgagggaatatgatcagcagggttttttgtttgtttttctgtgttttgctttttaacttatgcccacctttctgttggcagtcagcagccacatctgaagttatagctctctgatttagacaaggcttattcttccctttgttacaacctagtccctatagggacctgaatttgtgaccctagtctatgagattactttttaaatacagtttggttcaggatttataaaagcctaataaggctgggtgtggtggctcacacctgtaattccagcgctttgggaggctgggatgggcagatcactggagtccaggagtttgagaccagcctgggcaacatggcaaaaccccgtctctacataaaaatgtatgtactcagtagtactactcagtagtagtactgagtagctactcaggaggctgaggtgggaggattgcctaggaagtcgaggctgcagtgagccgagatcttgccactgctctcccgcctgggtgacagagtgagaccctgtctcaaaagaaaaaataagcctaataaaatgattgcacgcctggaaaacctacataggctccttcaagtcccatatatatataaagtcatccatggtatgtagttcacattgaagtcaagttgggggaaaagaaacttatttatctctttctcttttcctttattcaagtagcaattttcatttaattttattcaattcagaaatatttactgaactcctcttattaggaagcactagactggatataaagaaaacatcgtacaaggcatagaggactcagtcctgccttgcgaagggcacatagtctgactggaaagacacatgctgacagggtagactgtgttaggaataatgctcaaaatcctgaggacattgaacactcgaacaaaggattcttagcaaagcaattttacttctgcacagaggggtgcctccttggccagttgccatgagagcacacctgaacaaaggggcatgagagcctttattcctgacgcaagtcctgcccctgtaccctttccccccattggctggggttgggtcgtacaatctaaactaatcccagttggctaaacatttgatttttttagatagggtgggcacgtaaaatcaagtggagaggaaggggaaggggcgtctgtaatgagctagaaagttagtcctctttccaaataaggaaatgaatgtgagctggtactgaggtgtgcctgggcatctaacaaaggtaaaaaggaaaaaggagaaaaatcagggggtactatgaattaaagaataaaagattgatcagattatttgaagagaaacctcatcatatcccacaactggaagaaacaatttgatggcaagtttctcttcgtcgtttaccagctcaaaatctcaactatcaaaggcaagaaaaatacacacacacacacacacacacacacacacacacacacacacacacacccctctgcctttttctgtatggccaaagccttcagtccagctgaccacttcccactccagttaccatgttagcctcccaacttgtatctctgcacccttctgataaagcctccacaatgcaaaacacgaatcgtatcatatggctcttcttctctaaacacttccatctactctgtggttttagaagagaatgtaatagtcccacattacaaggtcttaataaattgcattcttgcagctctgtatcattacttgtaaacactgtagtctagatagccaggacacactgcatttcttttttaaggctcgatacctcttgccattttgcacgtagttttccttctgtctgaaatgccctttttccacctggcgcttgaatggccccttctgaaaacttcctagtcgtctttcaaaataaattcaaatgttagcttttgtgggtaacctattgacctctccaggctgagttaagctgttcccccgaggtgtcttgttgaaatcattattttttcctaaaatctctgttctaatttacttacatgtctgtgaatgcttagaggttacgaacttcagttttgtaagcttagtaactggcacaaagtctggcacagagtagcacctgaacaattatttttctggaataaataaagtaatggtttcattgaaatgattcgcattaaattaatgattagcattaaactacaacgtgtatatgaaacattccagttaggttgggttcattccattcctatttaaagagtttgtagtttctggctcttttccaactctgattcttcagactagaaatgcaatttctgctaatgtatttattttaaccaaacccgacatcaatcaagttatttgtattcctcataaggtaagcataggaatttacagtgatacaaaaacgcagctattatctcttataggcactggtaaagcttttgtgactagtgctactatactggtaaggtattgctgcttgtaatgaactaaatatttcagtggcttaacacaataggagttcttttcttgctcacatgacaacccagcgtatgttttcctagtcaagcagctttcttacatatgttattgcagaaacctaggtcctgttcatcttcttcctctgcctgccattcccttggtagcttttctctgctcgggtttcgcaagaggatgaaatcctattgaaaatgatctgagggtctattatgttctcaagaatggtacatatctagtctatgataaatgctcaggtaactgattaggtgtaatagatatcttaggattttgtcatgaacaatcagcatcaacaccacctggaaaattgttaaaaatgcaaattattgggctccacccagtatctactaaatccagaactccggggctaccatgcagcaattagcaaggtctccaggtgattctgttgatcctaaagtatgagaacaactgccctagggcgttaggacttaattctctcctcagtaagttgtaaagatttgccgtaggacctaagagtcttctgcttccagcaatagaaaggaaaaaaaatgtggaaacctcactaaatttttcaaagcctcagccccaaactgacaaacaacacttctgctcacattctgctggctataaattatcgtatagctagctgcccagtgaagtggaaccagctcaggacggcctactgttatattgccaggcattttttgagccacttgatgttatcttcttggtaatttaaatttaaccgtggtaggaatatttacaccacagaaattggcaaacactaaaaacaaggtgtttttaaacaccctgagatcagagatccagttgatatacatctaccagcacaccactggccatatacaggcttgccttatgccacggggagctctgcagctgaagtagcccttcaaacttgtcctgctttgagccaaattaggcctctatactttcaccttcatcagtcactgaatgagggctgcctggggaaaggcatgaacttggacaaggcagctctctgcagctcaggcagtccctgaagggactgacagttgaagaatgtctactgacatcatttccatcatctagaacaagagtctttctttgaagggggctctgagtagcatattcccgtgtccactgcagcccctccctttaagagactctgatataattgactgggggtgagccagtacattaggattttcctaaagttatctggataattttagtatgcaaccacaatagatactcttcaagaattaagctagttgctgagagggaactgttttttgttggtttgttttcactaatgtttgcactctacttcctttaaataaaattatgcctggagaaagggtttttgtatggagcaattgataaatatttgtagggtggttggctaaaataattataattcctttaaaagaaattctacccactaaagttaatttagaagtaaaatataatagaaatccaataatatattcaccaaatggattaagatgttcatgaattatcttcaaagtgttaatcgaataagtaatgtgtatgcttttctgttaaagaggaagttagaagatctgagctctgagtggaaggcggtaaaccgtttacttcaagagctgagggcaaagcagcctgacctagctcctggactgaccactattggagcctgtaagtatactggatcccattctctttggctctagctatttgttcaaaagtgcaactatgaagtgatgactgggtgagagagaaaatttgtttcaattctaaagatagagataaacctttgtgttattgactgtgcaaaaagtcttagagtacattccttggaaattgactctgattcaaagtgttgcatgacaacgggatatggggagtgttctctggagatacacccacaaggaagagaagagcacaagggagattgtgggagagtctgaaatgtgatttgtctgcagcagaggcctaagccagtctcgcaggagccctacatctgggctggctgtgcagagctgtcctgaattgcaggcagtgggcctggcccttgtattcctgatccagccagccattggccaggggctggctgctgcctgagagtggaaggacaacttggacaagttttctgaggccgaaggcaattcttagtaaggaacaccattaacaaccaatattcctagcatccagggatgtgtgcattgttcctgaagagggacaagtatgtctacaaaaatcacagaaaccacagaaacacacacagtcctactagcacctctccctgtcccatttgcaaacaatttaagagctctcccatttttagttcaagaaaaagaaaaatggattgggaggaccacaagctgacttgggggaggaatatttcctcatttagctgtagttttaacttttgttttcactgcatattttcagtctattttattttctttcctcttcagttgttgatagaaggtattcataaattctcatggcaatgttaatgctggctttgactctcaggggaaagaggccagaaaacttctttgctgtaccattccataattaggcagaactaaaaacatctttgggtgttgttttttgtttttgtttttttttttgccttgtctgcttttcaaagatcaaatgattgaagcattaaagcatggtgactggttcttcaggtaaagttgatttttattttatgtcaagtagaaaaatactgaactggaagaatcacagctggggtagcacaatcataattcattagaaggcataaatagtgcttggattaaaagaagccctacaatctggggacagtgcatctcatgtgccctctgggattactcggcagtcatcagagttagatttaacgactttggagacttaagcattatggttttttttttttgtcaatctgggacactgaaattgctgtatcagggttatactcaactgtgtcaggtttatttgtttttatgagctgtaatttttggttccctcagcgcatatgcatagtttgttcctatgttatcatttattggtgtctgttttctggctgtctctggtaggttcagcctcagactctgtaactccatgaagagattatgttccaatgatgttttataagtttgttaaactctgaactcatgagtttatgtcccatataagccacgttacacatggtaggaaggctccaaaaccagggcgccgaaatccatttaacgtgtaacttacctaaatgtaacaatgtttataagaaaaatacattggaagttccagttttgacttccagcaacatatataattcatccactttatttattaacttccatgtgttgagcatcatactggtgctgcgagtacagcatagaataaaagtctctcctttcataaaacatatattgtaattgaaagagaaagacaataaactaatgaagaaaatatatactgtctcaataattataagtgctgtagagtgtagtctacagattgatgtcaatgggtatttgttagacacacagaatctgaggcccctatcctagacccactgaatcacaatctgcattttaatagaatccccaggtgaatcctgtgcacactgacatttgagaaacaccattacagagaacaactaagcagggagatgggatgagggtattattgtctatagtgtggtcagggaagcttgtctgttaagagaacatcagaaaactgatgtaagtgaggaagtgagcctggtgtatttctgggaaaattattccaggcagggagagaaaagactgagcaacgatactgaagtaggaacaagatgacggaatattaaggagatcagtgagactagaggagtgggtcaggggaagtgtgatggaagccatgagagatactcatctttcatagcactgccctacttccttctccccaacatgagggtctcatcaccccccaccactcttgtcttctcctatgtcctccacattgctgccagtatggagagtctgggaatgccctcagctcaaagctgtttggtgatagctggcagagttgtggtagtagctaaaaaagaattaagggaaagaggaattttctcaaaagcaggtgcttttcatcctctttagcaaaccgaaacagatctgagcattaagtcaagatgttaaatacacaaatgttgaatgaaaaaaaaaacaaaaggtagtcatttaaattcagagctgcttttattaaaataagattttcttttttctttactgtggtagttcaaatatcagaataaagaattgtttctattcccgacttcctgacttgcaggaagttaatcagaaataaatgcaatataaaaaaagaaaatctaatttgtattatgcttcttgtatatgtttattatttcatgtactgtattacaatgtaatagaatttataattcattatagcagattgtttccattgcattcctactattaaatatgtagaagctacacatatacttgtagctttaacatatatgtctttatcctcaaaataactgcaaagaacatatagataatttttaaagattaaggagcctgaggtttagaggggagatagctagattaaggccacacagctagaaagcaagcaagcaagggtttcagtccacatgtcaagctccacagcctgtgttttgttttgtggctgtgctttacactatctctctgtccaagaacctaatggaaaattacagatacagatgcagctggccagcagttaatataatttaactcaatcttaaatttatctggagtaaaagtgatacaagtttccgtgttttttcttttctttctttcttttttctttgtgtgtgtgtgtgtgtgtgtgtgtgtgacagaatcttgctctgttgcccaggctggagtgcagtggtgcgatctcggtttactacaacctctgcctttcaggttcaagcgattctcctgcctcagcctcccaagtagctgggatacaggtgcgcaccaccatgcccagctaatttttgtagttttagtaaagacggggttgctccatgttgatcaggctggtcttaaactcctgacctcaagtgatccgcctgcctcagcctctcaaagtgctgggattacaggcatgagccaccttgactggcctgtttctgtgttttttctacttaagaagtagaaaaaattggttcactctatttgaatttcttagaaccatagaaatccaaacttggaataattattgcaattattatctagttgagtattcttcttttatagatgtagaagctgaggcctaaagttgcttgttttgttttatgaacactaaaccaaactaccttgtggctgcttacttaaattataaattataatggggtggccttgcctgagctgtataaattgttttaattatcaggacaaatcaacatactggaaaaaaaaagcaaaacttgcaattgttgttgcttagacacctgtccatatcagtttctattgttgcatagaagcaccccaaaacttaacagttcaaaacgagtgatttattgctcataattctgtgtgtctgaagtttgctctgtgattagctggatagttattctgatggtcttgcttggtgttacttatgtggatgcagttatctagcaagtgaacaggagctagatggtctaaaatgcactctctcagatatctgacagctggctgttggttgcagaaccttgattcttcataaggccactcatcatcctgtaggctagattaggcttcattacatggtattctcagggcagttttccaagagagggcgggtggaagctacaagaccttctgatgcctaggctttgaaacgtgtaggttacttctgctaagttatattggtcaaagcacctcaaaagatcagcccagattcaagagatgaggaaattacttcatctcgtgaaaggaggagatgccacatcgcatatcaaaggggtatgcatattggggatagaaggttttattgtcaccgtatttatacacaaatcactacattggggaaaaggagggaaactggagatcaaaagtgttggtcttaatccaacttaattctcaaaaattaccatgcgttagaaccacccagttcttcgcaaagtatagattactgggcttcaaccccagagtttctgatttactagctctggggtgagacctgcatctctctctctctctttttttttgagactgagtcttgctctgtcacccaggctggagtgcagtggtgcaatctcggctcacagcaacctctgcctcctgggttgaagcggttctcctgcctcagcctcctgagtagctaggattataggcacccgccaccacgcctggctaatttttgtatttttagtagagacagggtttcaccatgttggtcaggctggtctcgaactcctgacctcaggtgatccacctgcctcagcctcccatagtgctgggattacaggcgtgagccactgtgcccagccaagacttgcatctctgaaaagttcctaggttatgctgatgctggcctatgctttgagaactactaccacagacatacagtgagtggggaagaataaattcatcccttctgctgtgtgcagcaaggagtgggattccaatgagatccagtgctgtgaatgctaaagggaaatccatcttattttagcacctctactccccatctccccaccccgaggatgttatagcttagaagttcaaggagatggacaacacactaaaccaggcagtatttgccctgcagagctgttcagtgttcctggatgagacctctgagaagaaaagccataagttcctctagagactttcacaatcatttaggtagacaggactttgcatgggtctgaaggcttgcatggcagatggaggcaaagagccagcaaatctggttgtaaatgtcaatgtgaatcctttcttatccacaagctgctgggcctgagaacattaatgttctacaatacccgatttagcatttttgaaagaaattgcatatagacatgcttaatgtgaagactccaaatcaggatatttgattcaaatgtctcttggtaataactatggaatgaataacccattgtatatggacatatagaagagccagttaacagagttttctttttttttttttttttttttttttttttttttgagacggagtctcactctgtcgcccaggctggagtgcagtggcgcgatctcggctcactgcaagctccgcctcccgggttcacgccattctcctgcctcagcctcccccgtagctgggactacaggcgcccgccaccacgcccggctaatttttttgtgttttttagtagagacggggtttcactgtgttagccaggatggtctcgatctcctgacctcgtgatccgcccgcctcggccttccaaagtgctgggattacaggcgtgagccaccgcgcccggcccagagttttctagttgattaaacactggtaaaatcatctcttcctgtaattaagtttggagagagcaagtctcaagtgtaattaggaaagcacagtattggaggtcaagaagcctaaattctgatatctcagttgtgctaccaactatataagggatcaacagactgtttctgcaaaggaccgatactagatattttctgctttatgggtcatgtggtcaactctgtcattgtatactaaaagccacagacaatacctaaataaagggacatggctgtgctccagtgacactttatttacagaaacgaggcaggtaagatagatttgacccttagtgggctacccatttccccttagcactcagccttcctataaaccatgaagcgtctaactacaagtacctgtgagtcttcctgagtcctttctctgcctgtaggagtagctctcccacttgcagagcaggctggaagctggggaggagattatctctggaatagcacttaaccaatggacaaaagctgggggataaaggtgttggtcttcatagttttcatactgctatgaagaaatacccgagactggataatttatacaggaaaaagaagtttaatggactcacagttccacatggctggagaggcctcacaatcatggcagaaggcgaaggaagagcagaggcacttcttacatgacagcaggcaagagagcatgtgcagggaaactgctctttataaaaccatcagatctcatgagacttattcactatcaggagaacagcacaggaaaaccccacccccatgattcagttacctcccacatggtccctcccacaacacgtggggattattggagttacaattcaagatgagatttgggtgagaacacagccaaaccatatcaataaatatcccaccttcttctccccttgggtaggacacctccaatgcatgttccacactaaaaatctccagtgaattgggcagttgaccacaatgataagcatacttattagcatgcctcgtataggcttccttccgatgtgtaggctttcttcccattttggcagaatctggacccaaccccacatctcctgagtttgatttcagtcctcttcagtattctcatatatctcaactttgttccctgctgagatacaactgacagatatatatgtatcttcagctctgcagctctatcttctcttctaccatggctttctgggatcagctcccaattgaattatttgtatttaaatccttgtctcagggtctacttctgagcaaacctaaattaatacaagtcttagaattagtgccacagttataccttttgagtaagttatgttgcaattcccattttatagatgagataaccaagggtcagaaaggttaaataatttgtccaaggttacagagctagtcagtgacagagtgggtattcaaaaataagtctctatgattccagagcttatgctattaatcagtgcaccatgtatcaagcagtgatttagttatcttcatttgaattttttgaagtctctatttaaattgaatatcaaatcctcacatataaggttatttatacctttttatttgttttatttatttatttatttttgcttaacttttttttattatactttaagttttagggtacatgtgcacaatgtgcaggtctgttacatatatatacatgtgccatgttggtgtgctgcacccattaactcgtcattgaacattaggtatatctcctaatgctatccctcccccctccccccaccccacagcaggccccagtgtgtgatgttccccttcctgtgaccatgtgttctcattgttcaattcccacctgtgagtgagaatatgcggtgtttggttttttgtccttgcgatagtttgctgagaatgatggtttacagcttcatccatatccctacaaaggacatgaactcatcattttttatggctgcatagtattccatggtgatttatacattttaatttgaacttcactcacctctacaaagttaaataaagcattccatttccatttcaataatactttaaatatctaggcagttaaagcatgaggttacttggcacttaaatgtactcttgtcatactacttttgttggcttaaattgcaaaaaaaaaaaatggttaatttattgtgacaataccctacatttatctgcagtgatcattttttttgtgaaaatggccttcgtttatctgcagcaaaggaaaaagaggatggcaattagttcttgcattcttattcctctcttgggtcctgatccttctcattaatagaaacatggcaggggaggggtatataacccacaccctttcctgttgtggttatgtttccactgttgattctgcttcaggtgaacctttaggattaggcaaataaatttccgtgaggccaaatctttttcttcctcattaacagatgatttctctgctaaaaacacttacgacatggctatactattgccggttttatagttacaggctctaaaccttgaaaacttcctcaaagtctaatacgtcaggagcaagcttttgtacaaaaaatgtgaagacccttaatcagttccaataacaaaataaatccattttaaaccctatcccaagatactgcaaggccttggagcagctggagagactccttaactcttgacattaattaattaatttaaaaattcatatttgtatgtatcagtgaggtaagagtgcttgaaatataatgagatgtgtcacactgtagaaaggggagtgacaacagaaagccctggctggtgaggccccagcacttctcacactcatcagaaggaagtctttccatgaaggcagtagggggtccctggtcccaggccaggtccttcaacaatgctcactggttaacaggaaaggcactacagtggcatcattgttaacatccaagacagtgatagaatgtgaaacttctactgtttagtatttagtattcagcatttagatgttaattatccattttgtgatgaagttccctttcttctccctctcttaaccttttggtagttttattgcatggttaccatttccagttagggttgtgctttggggtctgaactgatgaaggaagagaaactctagttcatcatttctaggaaaaagagaaggctaacatcaattctgatgattagagattttttgattacctatgtcctgcattttaacagaaataaaatgttaattacagtaaacttactttaaccttcttatgctatttaacactcttcaagaaaggacttttgcttgaaatcactacagagtataccataatcttgactgtcatactctgaccaagaaaccagaactatttaggcatatttatgagagtaagtaccctaccgctcaaaatggaaggcttcaacatgtattcctaatatttcctaaaacttcactgaatagttttaaaattgaatataactttaccttcagagagaaacaagatttcgaaaggaaattgtagcagttttgtacttcaattgtcgattttaagattgtggtctgaaaagtatttgaacagtcattctttcttttccactatctcaggaaaggctctcattctattagaagcaatcttagaagcgtaactgccaactctcttcttaaaaagtgaagagcagatggagttctaccaatctgctatacttgacagtttttcaactacctaacctaagttccagttactgtctaaattatttttattcgaataggaaaaatacatttatgcttactgtacatttcgacagtgttcattctttgaggtctgttatttaatctccttcccacttttcttttctatcttaaatcagatgagtccccatggtctggcaacaaaacagctgtttctcaaatttttaacgtctctgtggccctcctcctacccttccaagtgttttccatactatttttctgttgtgggcttcagaattggatgctgttccataattactggtcttcccatgactctgtcacatcataaagtctatatatacccttttcctacgtttacatgccaaataccaggtgtgtctagctttaattcaatgactagcatatggtaggtattgcactaatattttttggtcaagtgaacatatattttacagatagatcaaatacatcaaccttcccatgtaataataataataccaagaagattaaatgatcgcgtgcttgaccagctgtttagtggcagaatctggacccaaccccacatctcctgagtttaatttcagtgctcttcagcattcttatatatctcaactttgttccctgctgagacacagctgacagatatatatatatatcttcacaatctcagtagtaagccctatttttttaagattacagtgctgatcaaagagggatattctatggcattgatgcaaatcttccaggccagatataacccctatctccttaaaccctcattcttgactgtgtcttgaaatcaaatttgagaacctctgctttacatgctaccttcctcttaaaattcataaggtttattccttctctcatcttcagtatttttatgaaaatatgttttactcttatttccaaagtgcttgccagcccatgctgagttcattagacaaacaatctaggtatcctaatatttaggtaaaattgctagcagcactaactataccagtacccacttaaattgcaatataaacctacaataggaaaaaaaaagtcaaaattatactactttcaattcctacttctggaataattatcacaccttcaaaaaaactcataattgttctccaatattaaaaaccaggaactaaattacatcactatatatatatagctatatagacatataactgtatatagtttatatatatattacatgtcactatatatggttatatatacagatagctatatctctatatagtttttatataggaaactatatatataaactcatatatatttatatataaactcatatatatataaactcatatatatttatatataaactcatatatatttatatataaactcatatatatataagagattttatatgtatatatgagagacaatattgaaataaaacaaactagccaatctccaatgtcccttcattttcccaggactcttctttattctcaaagaaatgtatgaatacacaatataaataaatgttctataatgttcattatggattataatagttttcttgtcatactgaagtgaatgggaattgtttcttcgattattagcatacttttcataactatgtgatttggtgataggcacttttgcttactaagttcagcatgatcaaaacagaactcctattatttttattgttgattcttatttctttaaggtaaaatatgcccttttcctttgaacctgcacactgtttaacaaataagcacataactcaggattgaattgtacacttcgatttgagcttttttttcaaggtcaggacccagtttcacaagaagttttattttttccaatacaactgacatccactcccaccagctgaaagacaagaaaaacttgtctaataaagctttcagattcaatttgctgcctgcatacagcttgaggaatctctggaggtcactcacagcatgtgttgcaaccccaacagggagaagtaatgaaaagattctagttaaaaagctgacactgccccttccaacctctttgaatgtgaatataataagccagtttacagacgcaaatctctatgattctggggatttccatcttgatctctgactccaaggaacatttgaatgcatggatttgtatccattatctgggtgaataaatgcttcatattgaaaaaaggggtgctttaacaacataagtctgatgtaaatcaggcaaaacaacattgtcacttcatgtttaactctcctggagggtctctaaggtctcacagtttggttctattccagtaatatataggcctatcatagccattttcaaaaataatacctgctttcatttcgattattccccctagcttttgcattgacccgaacatacctaatatttatcttagggctaacacgcattaatgccttgctctgtaccaggcattttgccaagtattctttgtgcatttttctgtttaatcttacagcagccttatgaaataggtactacattattattatttttcaccatgagaggaaatgaaagcctagagagaatggttatccaaaaacacccagctactaagtgggcacagcatggccttgaacctgagtctttataaagttcatgcctgtcttttacctttatgttaaacatactgaatcttggtcatgcagtctatgaatgaagactccatatactctaggaccaattctaccatattgtgcatgcttttgtacatattttccaaatgaaattaaacaacaatactctctcttcccctttcttttccgttttgcatgacatctaaatcttttattaaatctccgtgggtggaattgggccttaagtagtagtacctttgaagcttaatactataacctcagagttacggaagtggtttcaatatgaagaaatatatacgttcttttcttttcttttcttttctttttttggctcctctagaatagaaggcaatcaggagagaaaaagacattaagatgataggcttgattctcccacagtgttactacttagctttatttattctcccacatctgtaactgtcaattcaaggtcaaaaagccagtacagcagcagaattacaaaaagtagatctggaaaatctatagggtaccatagtccagcaccctgctgcaagtcaaaatcaattaaataaatatgtttaaacagcacttcatttaatcttaagggcaccacgactcccttggaaaattcttttttgtgttcagacctgattctctgaaagtattttctagtgttttctttgttcggtggctgtggtgaataagtggacccaattgcctacagcatgaaatcgtagaaatgaatatgggctggaacttcaatcaatcacacaaaccagaaacatagagttcatcacctcttctggaaagcgtccccttcggccgtcaaaagggtagagtttcctccaacatatgttcatacttccctttgcctcccatctgcaatttcaaccagtctgttgctctcgccctttttaggcttcacataccggatttcttcttaggagctcacttgaaaaaagggttgtatgctttaaaaatactaaaagtcactggactagatgataataaaatttctgtaaaataaaaagggagttaacagaggtgttaccacttatcataatggatattgttgacctttcctctagccagtgtcccacttaagcatgcttcttggctggaatttatttttctcatctggataaatctgaagcattatagtaaaacccagtgtgagcaaggccatggatgcaagtggattgagatgaatgagtggatagacctgcgtgggcagaaataatgaggtcagcaataagccataccaagggatgcacactcaaggaataaattggaggtagcagaataactgaacaaatgatacatttgatcagactgtcacatgaatatcaactgaaacaagttatgactgtagttagtgaaccctagagtgaagaaaacaaaatattgaaatccatctgatcaaaaaataataaaattgtttacatgtatatattatctaaaatttcccttaagaatgaagattataaattcccgcagttgaggaaactgaataagaggagaatcaggacagaatcttttctcttcgtattcctagtccatttttcttctaactacagtagtgagaacaagaatttattcaccaaatcataatacattgcaattaggggatgccatttgaatcttggaagacacgatttgaggcaaataaaaaatccatatttataaagtcaattattggtttatataatttactgtttcagcgggaggtataggttagtaatgtaagtcacttcaagaaggttttggtcgaagttttgccaattttttctgtaaaaagccagatagtaaatattttgggttttacaagccagaagatctttgttgaagttactcaactctgctaatgaggtgcaaagcagccataggcagtttgtaaatgcataagtgtggctgtgttccaataaaagtgtgtttgcaagaacaggcagttggttggatttggcccacaagccgtagttcactgacccctgttttagataaatactagtcaatagattccttgtagctaataaagggaatatagattgtttaatgtgtttccctaatcttcttaaggcttcctccaggggaaaaaatatttcttatcatcagcagtgttattaatgcttactcagaacaaagaataccacttacttagcatagaatggacatttataaagccactcatggaaagaataaagagatgtgaaatacctggtacaactcttaagagtgttccactatcatttgaaaaaatgatgagtagtagttatataaaaggactcgagcctaaaacatttgttctcactttggataacgttttcctatctcagcatcaaaaaatacaaagaaaggggataactaggtcttagattttctaaattctcatgactataagtcccatatatttagatattgaagtacccttaaatatacctaagtagaagtaataatttcgatattatgggaaatctaattactgctcatagttctcgagattaaaatgttatacaccacatctcagctttctttgaaacttgaaatggcatacttgtacaaaggtagaatggtctcccaaagcagcgtcatagattagcagaaaagagctatgataatgccacttcaactgactatcatttaaataatgaattagttaggaagagttaaattatatagttacaggcagcaggagatgtcaccatcagggggataagaagccattttccagtacactatttgacttaactggtgcagttccttctttaactgtaggttactcatttgtatccttaatttatcaatatactaatctgacaaataatttattaaggattactgtgtgccctcctgtgtgttagattctagggatacaatatggatcaagataagcgtgattcctagactcctagaaagtaagaaaactaaataactgtacgtgacaaatactaggatgtagaatactagggaagaatcaggaagaatcacctcacccagtctggagtattgcaacagagcgatgtcagaggaaaaattctggaaaaaaaaaaaaaaaaggaaatttgaagatgagacttgaaggataagtaggtgtacctaggcaaacaagtaggggagagtgttccaggcaagagaaacaagtaacagttggaggcaaaatggagcctagcacgttttaaaaatatcagtatggctgaagcactgagttggggttgggaatgggtgaggagcgatgtgtcagggaggacattccagatgatgctggaaatgcatgcatgttcgcaaactgcattttaagacatgttagagaaatcaaacacattttatttgaagggtaattgaaagccactgaagcattgtagagagactagtgacatgagcatatttgggttttagagggattactctggctgaagaataggtaactgattggataagagcaactttggaggctattccagtggttcaggtgatagataataatgacctaaactaaagaagtaataaagggaatggagacaaagtagacagattcaagtgatacttggcacgtggaaacaacaggccctggtaactgattggacataaaatggagagatacagagaacgcgaatagaacacccaggcatttggcttgataaaccgagtagaccgtggtagaaattactaaactatggagtattttagggttcaggggaactgtgagttcaattttagacatctagttttgcaaggccactgaggtaactgagcatatgagtcaggagagaagtttaggctaaaaatatggatgccagagttaaccagcgttatgataaaacaaagctgaagtctcgagggtaagaacacctaaacatctaggctggagaaggcagcaggtaaaaagtaaaaggagaggccaggcacggtggctcacgcctgtaatcccaacactttggggggccgaggtgggtggatcacctgaggtcgggagtttgagaccagcctgaccaacatggagaaaccgtgtctctactaaaaatacaaaatcagccaggcatggtggcgcatgcctgtaatcccagctactcgggaggctgaggcaggagaatcgcttgaacccaggaggtggaggttgcggtgagccaagattgtgccattgcgctccagcctgggcaacaagagtgaaactccgtctcaaaaaataaaaagaaagagagagagagagagagagagagaaacagagaaagagagagaggaagacaaagaaaggaaggaagggagggagggagggagggagggagggaaagaaaagaaaaggagaaaaattcaggagaatggttacttccagggagatggaggcgattgtgctgtggggaacacaagggtggggtcaaggtattagcagtattctatttcttgattggggttgtatttacataaagtgttgctttataattattcttcacactttatgtgtacgttctatgtaatcatctatagataagacagatttcactgtaaaagaaaataaaagcttccaaaagattatcatcacaattgtaacagattcccctggtgcctggagtcacacgccattttcctgcactgcagttgcagctgcagtggacagccctgtgtgagttcagacttgcctttagctgacagcatcccatgtcaagggaatggctcccatttttctactttctatctaagggacttctctgacatcccaggagcccacagattttgtgagctttctcacccttgaagttttagtgagtgagcaaccttcaaccaatggagatgggagcccatggatatatttttaaccactattccttccgggggcaaggggaattctctgtgattctcaggaacatacaaaagttctgtcaaaatacagtccccatggtccataagcattaccttgatgataatacatttgattggcatttcctccccctctgtctcactcttttggtttttcattcttgcttcctagggatcagcttccaaatgagctatctgtacccaagtcctcatccaggccctgttttcaggggacccaaagacaacaataagaaaaatggaactgaaagaggagaagactttaaggcatgaaaaaagttcctctgtattccatactgcatatttaactgcctactcaacagttccacttagatgtctcaaaaataatctcatgatcttttactgctatgaaatgcatgaccttcccctgatatattcctttcttcaggttttgtagcaccacttagctatccagtaacaaaatcttgggggtcattcttaaaaccttcccacctcacccctgctggacatccaccactaagttcagttgatttttttgctcctaaatatttcttggttcagctttcatttttagatttatcctgcatacccctgtacaatctcatcatctctttcctggactgttacagtagtcttatattaggatgatcatagtcttgatttgcctagagaaaacatgctttatgtcattgcctcagagtgactaatagtcccacctttcacttgtaacactatgcaggttattgggttaaataatactgtcatccaaacctaatctctcctcattcatttcttctctcctatgcatcttagctgtgtgaaaattcaaaatataaatttgatgacagacagaactctgtttaaaatgctccagtaccttaccatttatctcaaaataaaaatttcaaaaaaagaaatgatatcccacaggatcttgtatagtgtgaccctttccatttcatcatccttataccagatactgtgaactacttactctcttatctccacattgacctccctcctagttttgttttgcttatgaaagtgcttattttctgttttttaaagccattgcacatattggtctctctgattgagacactatccttttgaatttttgacctcatacctactcacttttcaggtctcagctcaaatgttatactcaggaaagacgctccttacctcccaaactaggttagtgtaaatggcactatttatactcctcttccagagcacacaccaaatcttatatttatttgtgggacaatttgaattcatgttgttccccctactcaattgtgagcttcttgaggacatactctgcctcctccttacctagctttattgaagtataattgagaaataaaaactgtatgtattcaaggtatacaacatgatgattttatatgactatattgtgagatgattaccacaatcaaattaattaatacatctagcacaagaaatagttactattgtgtgtgtgttgggggggggggatgaggacacttaagatccagtcttgtagcaaatttcaagtaaacagtaaagtattattaactatagtaaccataatgtacattagatccccagacatcttataactgaaagtttgtgccctttgaccaatgatatggtttggctgtgtccccacccaaatctcaccttgaattgtaatccctgtaattcccatgtgttgtgggagggacccagggggaagtaattgaatcatgggtttgtttccccccatgctgttgtcgtgatagtgaatgagttctcatgagatctgatggttttataagcatctggcatttcccttgctggcactcattctctctcctatcaccctgtgaaaaggtgccttcctccatgattgtaagtttccggaggcctctgaagccatgcggaactgtgagtctattaaacctcttttctttataaattacccggtcttgggtatttcttcatagcagcatgagaacggactaatacagtaaattggtactgcagagagtggggtattgctgtaaatatacctgaaaatgtggaagtgacttggaactgggtaagaggcacaggttggaacagtttggagggctagaagatgacaggaaaatgtgggaaaatttgaaacttcctagagacttgttgaatggttttgaccaaaatgccgatggtgatgtggacgatgaagtccaggctgaggtggtctcagatggagattaggaacttcttgggaactggagcaaaggacactgttgctaagctttagcaaagagactggcagcattttcccctggcctagagatctgtggaaatttgaacttgagagagatgatctgaaattggaactttgttttaaagggaagcagagcatcaaagtttggaaaatctgcagcctaacaatgtgatagaaaagaaaaacccattttctgagaaatacaagctggctgcagaactttgcttaagtaaaggagccaaatgttaagcgccaagacaatggggaagatgtctccagggcatgtcagaggtcttaatggcagcccctcccatcacaagcccagaggcctaaaaggaaaacatggtttcacgggccaggcacagggccgtgctgctttgtggagtctcaggacttcgtgccctgcataccagctgtggctcaaagaagccaaagtacagctcaggctgttgcttcagagggtgcaggccttagtggcttacatgtggtgttgggcctggggttggacagaagtcaagaattgaggtttgcaacctctgcctagaattcagaggatgtatggaaaagcctaggtgtccaggcagaagtttgctgcaggggcagggccctcatggaaaacctctctgctgggacagtgcagaaggaaaatgtggggtcggagctccacacagagtccccactggggcactgcctagtggagctgtgagaagaggaccaccatcatccaaaccccagaatagtcagaaatgctgatagtttgaaccatgcatctagaaaagctgcagatactcagtgctagccatgatagcagctgggagggggctgtaccctgcaaagccacaagggcagagctgcccaaggccatgggagcccacctcttgcatcagcatgacctggatgtgagacatgtagtcaaaggagatcatttgggcagttcaaagtgtaatgactgccctattggatttaagacttgcatgtggcctgtaacccctttattttggccaatttctcccattcggaacaggtgtatttacccaatgcctgtaccccccattgtatcctggaagtaactaacttgttttggattttcaggctcataggcggatgggacttgctttgccttagatgaaactttggacttggacttttgggttaatgttggaatgagttaagactttgggtgactgttgggaaggcattattgtgttttgaaatgtgatgacatgagatttgggaggggccaggagcagaatgatatgttttggctgtgtccccacccaaatctcaccttgaattgtaatctccaaaatccccaggtgtcatgggagggacccagtgagaggtaattgaatcatggaggcagtttcccccatgctattctcatgatagtgggtgatttcacatgagatctgatggttttataagtgtctggcgtttcccctgctggcactcattctccctcctgccaccctgtgaagaggtgccttctgccatgattgtaagtttcctgaggcctccccagccatgcagaatggtgaatcaattaaaactgttttcttcataaattacccagtctcgggtatttcttcatagcagcatgagaacagactaatacaaccaacatcccctcttgtcgattttcattgaatccccattacctgggaatgaatgaggaaggcagaaatagaaatcagcgtattgttcaatatagaaatcctgaagttacacaagataattacgagcaagactcagtacagagaaggaacccttgagctggggatcagagtcttctggaaacaaggagtaccaaaggggagtgaaaaagagaagtggagaatgagtagtagcagtaaaagaggaagtatgtaaagaaatggaaataaagatgaaataaactgtcatcttgttccagagacaaagctagctaggggagctaaggaaatttagagggataaaaagtctcatccaaaccttcataatgagctaagggctagtttttcatagaccctagcccaacttgcaaccctctcactctcttacttttttcctggctctgttttgctttactgcctttcatataatctaaaatgatgttaaatgtatatttcctgtctcttttctatatcacaatataaattccatgaggccattgcctgtgccacatttaccactgtactcccagtgcctagaatggtgcccagatcaagtagactcccagagtgtctgttgtcaaatgattctcagtccagtgatgtttgcactacatggtgctgccacttttttttttttttttacttcattccatttggaatttggatcattttgccaactttagggtttattcctctttatttcccctgtgtttgctgaatatctgactatctatttttctcagctctcttctcctcacactttgcctccaacttcctctctgctacaaattatacttagcacaagactggagccacttttcattgattttgatgtcagtgcttgagtgacaactccatgtggagaactttcaacctcctgctgtctcgttgtttgctttgaaaaaaaaaaatactcatcttcttcctgaacccactgggtaaatttatgctcacaaaaaagacaaaacttctagaacaaaaactgtatgagcttcaaaagtattagttttcccttgattttgagactcaaaagtaccatagaaattttaaaagggggatgaagtaattttgtcattcaacccgatatattttacaatttgaatgtcagaaccatgaaatgtcttttcagtgtactatcatcctcactatttccacctataaaagaaaagcaaaaatattgtttgagaacaaaaaaatattgcagtagcggaaaaattcactttaagtctttttttggaggttgccacatcacgcctgtcttcagctcctctcactgaagattctttgttttcttgaaaccagttggtcacttccaattcttaccacctataaatcttcctggttctttatatttcactttatatgtcccttatctcctctgatttttgttccagtctttcattttttacattctttgtcatcctatatgtcagaaagaatctgccactccaaattccttaatatatttatctaccagtgtttatttgcctgtcacatgtactcttcagtaatccattgacttgaaaactttctactctgtctttcttactatagtttgcttcttgagttcaaattattaatatattaggtcaagtaattctatttttatgcacattttacctaacattcttggtaaatataattgttttttaaattgcatcacatggtgagtattaatttaagacgtaattagtattaatctactggacaagattttatttattaactgttttgccctttgctagggttctgtaatctcaccctcagtgcctttaaatagtcttacccaaggatcacctatccctcttcaatttaaattctctattgtgttagtttctgagattgcacattctctggtttggtttggtttttcagtgatctctgtggtcacttccaaccatttctacttagtttacttttttccctgttagccctcttcagtgttaatatcacctggaagttaacccattcctagtctgcattgctctatggccagcatcttggctgattggccatcacctatcctgtacttattgtcaatttttttaaattttttattgtggcaaacagcacataacggaaaatttaccatctgtctttgttcatgtatgttgctataaaggaatgccagagactgggcaatttataaagaatggaaggtttatttggctcatggttctgcaggctgtacaaaaaagcatggcaccactaccaacttctcatgagggcctcaggcttcttccattcatggtgaagggcaaaggggagctggtgtgtagagatcacatggttagagagcataaacaagagagagaggggaagtgccaggctgttatttggcaactagctcttgcagaacctaacagaatgagcagtcactcaacctgcccccaggaagggcattaagccattcaagaaggatccacccccatgaccccacacttcccgttaagccccacctccaatattgaggatcaaatttcaacatgagatttggaggggacaacatctgaactatagcattatcttaattcaaataattttactaccaattccatttattagagaatctaagattaagactactgaaactatgccaatgattatctctagttcaggcttctctcttcaattccaaactcatattttcacctgctgacaagctaccacgtagatgttccacaggtatttctaactcaggatatgtaaaattgatgttatcattattttctgaaaatctattcctcttactatattccctatttttgtgaatgacacaatctaatggactggccatgttaaaaatcaggaagtttttctggcactttctttattccttaatattaagccccacgataaattaccaatcctttcgatcttgttaagacaaataagcttgaaatttcttatctcttatttagcactgcaattttgttttctcattcattcagatagcatcttctacaaaacctcttcactagtttttctgtctctcagctcatcttgtacactgcaaatccattaaaactacactttttaacatgccaatcataatgtattagtaaaggttgtataatagttctctttctcttctaggataaaagctaaatttttcagcttggtacacaaggccgttcatggatttggtacctactagtctatctagggtatttcctacatcttccctcctctctcttgaaaaatcaagtaatactaaactatttgtaactccctaatcaccaattgctgcctttatactttaacatatattcttccttttgctagaaatacatttgtcataataggctctttggtaaacttaccattacattctcagtttataatattatttgtgtaagtaccttttttcctacttagtcctccaggggaatgcatgtgcttctctctccatattatcattttaaaatttactcctatttcagcaagtatcataatattttactgagattaattgttggcatatttatgttaccctggtgacatatttaatagttaagatgctttgggctgcaagaaagagaatgcactttcaaagtggcttcaaaaataagaataattcaactcacataactggaagttcagaggttaaagctggctccagatgaagtacaagcagagctctgtcactctttctctatgactttctttgtcctgatttttttctctgcgtcagctttgacctcctcactagttgccctccaggttccaagatgactgccagcaacaaatgggtaacataatttcttgttacagtgagagacataaacacttacctcacagattcagagatttcaccctcagataagaacaatcaaaattttaattgtgtatctactgtatcattagtatatgtattaggtattcatatatatctactattgtactaaagatgattcagaatggtttcataagctggttgatttaaacttttcttcctgaaccaagaggatgagattatcttgactggcttagaatcgaagatttaggtgaatctaaatccatctccagaactgaggatggattccgtagaaacttgaagacaattggaattctcctagaaagcagaatttcagagtgggtgtagggatatctttgaatggaagttgtttaagccaccaacaatattcactccattggggtgacactgggcccaaaggtacccagttaatatttgttcaacgaacctataggaagacaatattatctgcaagctatttataaactaaatgacaacgagaagtatttttagaaaagttaatcatatacaatttagtcattcacattgggaggctcttcctaaatttcgtttctgatccttatcttgatctttgacgcaatcatatcttggcctccatctaaaagccagtagaagcctctggccattttttaaacaattggtttaacaacattaattggaatctatatagctcaacttaaaaaaaaaaaaaagaggaactagcttatcataatacaatattgtcaaggcaagtgatacttccatgcagctattcagcatttggtgtattcttggtttctgcagacctaataaaaagagattatctcagcgtcctctaggtttaattttaaaaaacaagaaaccatgaacaatgaaaatgatttcaaaacatcttcactcacatctaaaatatgaaatagctagatcagaggttcttaataatttaatcggtgaagcataactgaaggatttagaaaaagtgcctaaactattaaaagattcttcagctgctgcttaatgttgatatcaagttattttttacactggcaaacagctaagccattccctggtcacatccacttttcagcatttagcgctcctctcaatcatcccgatcacagccccaggaatgtttcatggcatctccgcaataatagtatattactattgggtcctgaattttgaggtagtttatctttcagaaaggatatgaatagagcaataagtccaagtagagtgggctttattaatgatgcccaagattttagacgtatactataatcttcaatcaattttaacaccacttcccttaccctagttttagtctaaaccagtccaactgtgctgtagtctcagataatacaatgttagattttttttttcaagatatagaattgtcgggaaaacttgtatgtaacctataccaatctaaatttcttagcatttaactctaaagagtaaagcttttagcacttcctgtgtaatacaagggcaagtgctgatttctctgaatataattttcctttgttagcacatatgttcactgtttaataaaaataagaatgcttcaattatctccttttgtcaagggcctgagaaataaagaaatatacagagggtcccaatctaaaaatgttttgatttacaatggttcggcttaggatatttttattttacaatggtgtgaaagtaatatgcactcagtagaaatcatacttcaagtactcatacaactgttctgcttttcatgttcaatacagtattcaataaattacatgagatgttcaacacctttaataaaataggctttgtgttagatgattttgcccaactgtaggctaatgtaagtgttctgaccatgttgaaggtaggctaggctaagcaatgatgttcagtaggttaggtttattaaatgcatttttcaatttatgatgttttcaacttatgatgggtttttcaatttatgatgttttcaacgtatgatgggtttatcaggaaataatcccattgtacgttgaggagcacctgtatcaatataggcatttacacaactctcgtactgatagcggcaggaggcagagaagctctaggcagaaaagggatggtccccagcgaaaaccccaccctcaagccaaaaagcctgaaaccgcagctcaaagtgggaacttatatcccagttttcctgctcgaatgttgcctttttctaaaccacccatggccccaccccaccccatcctgtgcctataaaaaccccagactcagctggtagacaggactacagctggacatcagagagaagcagcttgacttcagagggacaacttgatggcataactttagagaagaatccggctggacttcaggggaagattacttgccacccccatccccttttcagctccccttcccactgagagccactttcatcggcagtacaatccctcacatttacaatccttcaatttgttcatgtgacctcattttccctagatgctggacaagagctcaggagccacaagtgtgaatacaaaaggccctttgcccttgctggtggagggcagctgcctcctgtgaaaagacaaatggcccactgagctgttaacgcctaagctgtccgtggatggcagagctaacagagcactgtaacacaccctctggggcttcaggggtcgcagacgcctccacctagatgctgctccagtgctcatgcactccagttcccacctcgtttgcttgcacactccctccagtgaggagttgagagcagtgggctaagtaaataaggcacccctgttgcgagttccacaaaggggtcagggaaatatcctgcttcgttactaagtaggtataaaccctttactaagttagtaattattcagtaataatacttaaatgaaagctattctgttagactaaattcagattatcaaagacacgacagaaaacagctttctcattcatgaacctattatttccttttgtaaaatatgttaaatgaaaatacagccgtcatgctaatttctaatggtagaacatattttgaaaactcctttatgtttggaagattttgctttagtgcagataatcagaatgatgtgatatactaagaaataatttttaaaatgagatgtgacatttctcataatctaaataagaaatggcaaaacattgtcctaagctaaataactcatatgaagtgataaaatattgctttctaaaggtccatgatatgtagtgatttctaatgtgtttaatagcattgatcctattgggtaattgggtggttctaacatgtaaggaaggcctccagtactaatttcatgtactgggaaactactgggcagggatgaatcccttaactcctaagtaagactatcagatcatataaatctgctttttgatttgcaaagactcttaggcatacctcttgagaatattaaacatctactaaattatatgtaaagcatttcagtctaagatttacaatgctcaaaggagaaagattttaaagttcagcattggaatttccataatttccttccaattgtagaattttacaattgagatagcaaataataatataaataaatatgtaagactgaaatcaacataggagtttggaaagaagactgtatgggttaactagagttgtcaacaaagacttcacagaagattgtgatcgtagacattagtaaggaataaaatgggtgcaaaaaaaagtctaagaaacaacaaggataaatttattttgtaaagagtgaaagcatattgggtattacataaagagactggctagtttgacacaatgtgtacttttggggtaagcagtgggaaatcactttctgtaagtaaagtggaagagaattcaggtattggatatggtcatataggatttttcaacctttgttttgcccccatccctatcctaccagtatcatcacagatgttggcaatattcactcacttgcctgaagatagatattcatgtcaggggctacagatatgtaaaggtgaatgaagttaaatagcaaaattcaagcacactagttctgactgtgcaccctctctcactcagaaaagcactttggaatgcgagagtactcttatattgacaacctttagttggttctaatttataaaaaaatataaaaatatttagacaatttggatattttatatctatgccacaacccattgtcaaatgattgagatatcattgtttggcaacaatgaaactgaaatcaactctaagagtaaagagtacgacttttaaagatatttggttaagagtaatgttgcaaggcagagaccaacattatagaagttctcaacctgtgtgctggatatagctaaaatttcccaggaccattgaaagaaattctcaaatccacaaccacctcaagtgttgtctgtgaatcaaaggagtgatgcattacccacaaacatgtagtagacattttttaagtgatgtagatgctactgcaattaataaatgcaaaattatattacaatattactgaattcagaataagttgattttgtcactatttttctcaatctacgcatgctagatataaagttattatatagagacgtaacatttttaatatttcagaagcatgctcatgatattgtaaaccaggcactgttaaaagatcactggattgggaattaataaacctgggatctagtcctcatttgatctcttgttggctatggtttgggggttttgggcaaactattcaaccttttctgccttggtttaattgataaatgatggtgttttcccagataaatcccttcccaacttaatattaccagatgtagcatctatggtttagaatgtacagtataaattaaccttcctgaagatcttcacaagttactataacctatattttcatggcactgaaaactaagtttttgatagcttacgtttttataaataatttacttactcatttttatcataataataaatctgattcactaatcaccaaaatatcatttttgaaaatagatgcatgaaaggatccgaacttgttatggttttatctgttcaagtcacctaattttggtagccacaggcccccattgtcaataggggaagattatccattttagcaatacagtctctgataacttcagcccatatgcccttcaattccacttttacgtcagattgaatgggaatgtgaggcccccagtagtaaactaaccctactttctctttggaaattggtctttctacctagctctttgcctctgttcacgttcttgtattccacagaaaatatatacattaggtgttaaaatcacaatgattaacaatttttaagtagaaatagttattaagtatagcataatcatgcctttgaattagtacaaaagtaggaaacagagctttagtgacttttttcattctttccaccatttacagggcaaaaatgaagaattttaccaattcaaaactatgcacatgtatagtttccaccagtatttagtagttatgtttctcaagatgtataattcctttcctttctgttttctgtagtttgataaaccctagataggagttaatgttgtttcagttaggtttattatttcttttatgtggtttaatttcatgcaataagctagagattttgtaacataacttgataaaaattttctcccttcgtatctttttgttttaaaataatggattaatatagattgtaattttacagtagaggaaatacattttacttttagttcttatctagatatcttaggaaaaaagaaacatcatttttaaggattattatttttctactaatgaaaaaaatagcatgattttccattctggactttgtaattaactttaccttggaataattgaatcttaaatataacttcattgaaaattttattttcaagtaacattttaaaatgcaaaatttgtgtgatctctactaaaaagaactctcacatcccaatgtgcttatagctacaataattggttaaaagagacaaattataaagaagatataggttgtgacattgaaattacaaaatgtggattagggaagtaagcgtgtagagttttgtatgcaatcaaagttaagttattaccagcttaaaaaacccttacgtaagatgtaaagaaaagcaaaaacctatagtagcaaaagcaaaaacctatagtagatatacaaaaggtaaaaagtaaggaatcaaagtatactactgagcaaaacagtcaaaccataaaagaagacaacaaaaaaaggcatatagaacaaaggatctacaaaacaattagaaaacaactttttaaatggcagtagtaaattcctacctatcaatatttactttgaatgtaaatggattaaattcaccagtctaaagatagagtggccaaatggattaaaacaacaagactcaactacatgctgcccataagagactcacgtcatcttttaggacacatgttgactgaaatagaagagatagaaaaagatattttggtttccatgcaaatggaaaccaaaagagaatggggatagccatacttctattagacaaaataggctttaaaaatcaaaaactaaaaagacacaaagaaggtcattaaataatgataaaaggatcaattcatcaagaaggtataacaattgtaaatatatatgcacccaacattggagtacctaaatatataaagcaaatataaagtgataaaaagaaagagacaaactacagtacaataatagtaggggacttctaccccaaattcaacaatagacagaaaatccacattaaaaaatcaataagaatgcattggactttatgctttagatcaaatagacctagcagacatatacagtacatctcatctaacagcaggagaatatacattcttatcaagtgcacaagaaacaattcttcagggtagatcatatgttaggccacaaaatgagtcctaacaaatttaacaagattgaaagcatgtattttatgtaaaacaacgccatcatggaaaaagtactagtgtaaacaaggtttaaatatgatttactgattgtttaaaaaggaattatcttagccctgatctgatgggatttcccctttgtaagcagcaaaaataagttcataatgaagcaactgtaataatacagcttcacagatctttctgaataaacagagttggatatgtttctacttcagaaaccatttactgtgggctcacagcttttccatacactctttacactcttaattttaaacccattcatcaaaaggattaagacaatgagattcaagtccaagacaataggaagtatgtgcatcaaaactgtcatgctaatgctctgaggaacattgttatttcaatagcataatttaaaaccactgaaaccatgttttatttatgattacctttcatacgttcaaaaagaatttgagatggtttggcagggatgtcttaaagaaacaaacaccaaatttttatttgttgtgcttctaacaagcaatttttcctacgtaagtgttacctgttttctccccttgattttgatctcttttgtatggttggtagttgtcgcacttctgggcatagtatggttttctacaagttaaataaaaacataaattgattttgatgtagctagttccactatttcagttagtgtgttttccatacctgcaattcataacatgtttactgacccagaacgttaaaactcaagtttagttcaatacagtcacttcaaaccaacttaagatagcagttacatttccaaggtcattatgaagacggagttcaagacttcagcagttgaatttgtcaagctcatgggtcttttagttacaggaagtgtgcatatttcacataagaaacagcaactctgatgatacattgaaactcaaatatacccaaggagtgtaaaactactttataagcccttaaacaataaatatgccaacaatcctctgcatactttttgtcattttttagagcattcaattgaattatataacatgtgataccaataaataattaactttttatttatttatttagagaatgattcttgctttgtctcccaggctggagtgcaatggcatgatctcagctcactgcaacctccacctcttagtttcaagtgattctcctgcctcagcctcccaagtagctgggattacagccatgcaccaccacgcctggctaattttgtacttttagtagagacagggtttcaccataatgatcaggctggccttgaactccggacctcaggtgttctaccacctcagcctcccaaagtgctggtattacaggcatgagccacagcgcctggcttataattaactttaaaaaatattctactatcgaatgcctgaaaaaatcatattacttctatgtattaaaaacaaactattacgtaaatagaccagagatacggtgtcagagatgagattccttggcaacagtctctgagacaaaaagttgcacacagaaagtattttgagaagtattgttgctatttataaggaagtgaaggaggcagtattgggcagagagaaaagctcatccacactgcagttgctactgaggcttcagcccatgtgacagggacactggagctgggatggtctttcagagttctaccaaattgaggcaaatgggcgagacttttgtatctttgcactagccaagagcaggcaccagggagaaatgcagctgtgatccttttgtagatattattattctggagtcaatgcaaccacaccacaaatactaggaataatattggtagtgtgggtgcatcgactccagaagaggatcttgatgaagcattacagtatccactacagagaggcactggcatattctgcttaccccacaaatattgcaatgaggatgcaagtaggagtagtgaggacataaaataaatcgattattttccactgggccttaatatatcagaaccattggaatttacaggatgatatttattatagtactcaaaaaaatctcttttaaatctccttaactcagaagggaattttaaaaagtccacaattcacctggtctatgaattcccttttaaaataaaatgtggtttaatcaaatttacaagaaaaaaacaaacaaccccatcaaaaagtgggggaaggatataaacagactcttctcaaaagaagacatttatgtggccaaaagacacatgaaaaaaagctcatcatcactggtcattagagaaatgcaaatcaaaaccgcaatgagataccatctcacatcagttagaaaggcgatcattaaaaagtcaggaaacaacagatgctggagaggatgtggagaaataggaacgcttttacactgttggtgggagtgtgaattacttcaaccattgtggaagaccgtgtggcgattcctcaaggatctacaaccagaaataccatttaactcagccatcccattactgggtatatacccaaaggattataaatcattctactgtaaagacacatgcacacgtacgtttgttgcagcactgtttacaatagcaaagacttggaaccaacccaaatgtccatcaataatagactggatacagaaaatgtggcacatatacaccatagaatactatgcagccataaaaaaggatgcgttcgtgtcctttgtaaggacatggatgaagctggaaaccatcattctcagcaaactaacacaggaacagaaaaccaaacaccgcatgttctcactcataagtgggagttgaacgatgagaacacatggagatgggggaggggaacatcacacaccagttgggggattggggggcagagggagggataacgttaggagaaatacctaatgtagatgaagggttgatgggtacagcaaaccaccatggcacgtgtatacctacgtagcaaacctgtacattctgcacatgtatcccagaacttaaagtataatttaaaaaatgtggttgaaaaacaaaacccacataatacaaactttgccagcttaactgttttatgtgtacaaaccagtagtgttaactatacatacattgttattcaacagatctctagaatgttttcatctctcaaatccgaaactccaaacccactgaagagctcccattgctccctgtaccccagcactggcaatatgaccactctactttctgtctctaaagagtttaactactttagatacatcatataaaaggaagcatgcagtatttgtcattttatgactggcttatttcacttagcataatgtcttcaaggtacacccatgttgtagcataggaaaggatttccttctttttttgtggccgagtaataatattccgttgtgtcctataccacattttttaatccgtttatcaatcaatggacattttagttacttcaatttttggctattgtgaattatgccgcagttaatatgagtgtgcaaatatctctttaagatcctgtttttaattcttttggatatacagatgctcattgatttacactgggattacatcccaatcagcccatcataagttgaaaatatcatgtcaaaaattaatttaatatgcctaagctaccaaacatcattgcttagtctagcatactttaaatgttatcagaacatgtagattacagtacatctgggcaaaatcatcttgcaacacagtacatagtagagtatcaattatttatcctcatgataaatatcatgctgcaacccaatatgtcagaagagagtatcatactgcatatttactagccctagaaaagatcaaaattcaaaatttgaagtatggtttcttaatgaatgcatatcgctttcacaccattgtaaagtccaaaaattacaagttagaccttagtaagttggggactaaccgtacacccagaaatgggattgctggattatatgataattctatttttattttttgaggactggattatatgataattctatttttatgttttgaggaacttccatacggttttccatagtggctacaccttttcacattcccaccaacaatgcagaagtgtttcagtttctccacatccttgccagcacatgttattttctgtttatgatcgtggtcatcctcatggttgtgaggtaatatctcattgtggttttcgttcttcatttgcatttccccgatgattgacgatgttgagtatgttttcagatgcttgttggctgtgtatatattttctttggagaaatgtctatttaaatccttgcccattttaaaatcaggttaattgtttttggtgaattccttattaattactcacctcagagcctttcttcttaaaatacagatttctcagaacctttcatctaatttactaaatgttgatcttgaagaagtattttaatttatctgaatttagtttcccgttctataaattgatagtaatcatgttttccctatccacaccagagtggtatgatgaggaaccaatgcagaaaatgactaaaaaggcatttttatgctgtccagatcttgtgcaaatatattataattgatttgaaccaaaagaatctacattttaagactatttaatattgtcgcatttacattgcactaatggttcctcttttttctcactgatgaagttctagattgaaactctgaggaaactgtaaatcacagttacataactctgttatattaatttatataacttctctgtctctctctaaatatatatatttagactatatatacatatgcatatatatatttagagagagaacgagattacacttaaggactctgcttagtacattgcaacttgcacctcattctaattgtgaaaacaacaacaaattttgattgagaccctgttatttttcagacctttggtcttgtgaggaaggaaaagatgattctgatacttatctcaaatagcttatcatctcctctggtggatgaggcttgtgagggcctgacacatggtagaggatcttattcattatataacaactttcaaaacacatcactaattatttttctgcttaaggtgaaaacgtagctctcccaaacaaataagagatttagactgaattctgtagaaaacactgcttacctcattttgcttagttttcactgcagagtcttgtctctaacattcaggtaggaggaactctattttaaaaaattgaataaacaaacccaaatcagaataaattatttaattcaggagttttttaaggtgctcagaattttggtagaatagcagtgtattttctgtaataagaactacacaatgttctctagctggttatactcaaatggttatatggattttattctgatatcagttttgcaattgatgaccacccttcatcaatagcgtggtctttattatggtttcatctggctttttcttcccttgtcttctgcactgggctgcctacttcttggctcttattattacatactctacttttttcatatacaaaggtcttagtgcattaatagtgagtttctgctaaaagtgttactttcttcaaatatcctgtcaaatgctggctgcctgatttattgacctcatagagtgactatgtgaatcttccattctctgtggaattccattccacattttaacttaaagactccgtcttttccagctgtgttctctctgctggataagcatttttcttttaatttctgtggtaatgggaagggaattttaaatcctgttttgcgtacaagtgtttaacaggtaaaaatggatgctgtgtcagctatctattgctgtgtaacaagctaccccaaatgtagagacttaaaataagaatcattttttttttttagctcatgattcttgattctgcttggggcttggttcatcgaggcgattcttttgctagactcagctgtgctcattcatgcactcgtggtcagctggtagttgatgaccacatgtggcattcatatgtctggtataactttttggttataagttgagacggtgtgggtgacaggatcacttgcctgtaattattcatcaggctagcatagttccatagcggtggaagagttccaagcatagcccaacacccaagcattgttaagcctctgcttatgtcatgtttgctgatacctcattagccgaaacaagtgacttgaccaatccatattcaaggagtggagaaacagactatggctcttaatgggagaatctggaatatctcttgacaaaagtgtagatgcaagaggagaatctgtggacatttactctccagcagagatgttgtcatttttgtcactaagacagttcctgtgtaatattatttattattccttggcagccataagtttgtggtttacttatggatacttcagtgcctgcccaatatcatgttggaaagagaagcccttaacaatttctcttaatttctacttctgaggaatgagaaaaaaaaaattggataggcataaatgatttccagcacaaattctaagcagctatttgagaggtgggtgggtagggagagatggaaaatccttttaattgagacatgctcaaccataagcaatttttctttcctcaggagacatttggtaatgtcaggagacatttttggttgtacatctaggagggagctctggccagagatactgacaagcaattctgatcctacaatgcacaggacagccactcacgacaaaaaattatctgggacaaaaatgtcaatagtgctgagattgagaaaccctgcttttcactgagcgcatgtagatgaattcatataatgttagttatagaagggcacttagatgatgccaactaaaacaggaaaaggcaatgattatttctctattcaagttagtgaaggaaggatatgtttaaagtcaggttggagatatttctcaagggtaatatttaagttgtgagtggatgccagatgcgcttgattgttacaatccatatttttatagctatatcaaatgatcttctctcccaaattaaaatggatattagatatatttcatggataccatatattataagctatagctcttagaagtatttgagtgattaataattcttgcatattgaatgagacatgtaagaaagatacctgatgtcctatgattcttagaaatatgtgcagtggttaagcacattgtcttggaaacatcacttgttaatgtgagatcctgaacaagtttcgttaccttggtaaaagggggatgataacatctaccctgaagatggtttggtaaaggtgaaataaaagagggtttatgaagaaccttgcctagcacataagaatcactgagtaaatgatgggggtgatggcagtgttggtggcaattatcttacttgtaagtagtagcaaatatttatttggattatatttttaatagcaagaaagaatctattaaaatgtaagcaaatagcaccattaagctttaaaaatccatagctcccaaacttaacatttttttttcttaaatccagaaatacaaatggttatcatgaatccttgagttccagtactccggccttgcctatgtagagtacaagcatttatttttctaaaatgagaattattgatgttaggtgtgtcatatattttatttactctttagagtgacagaaaagaaagcagacaaaaataagtgtttatgtgttcatagtgtttgtttctaattttccaacttgtatgtgcagactgtaaatatttagagggaagacatgaaattcttccttacctacacaatagattgtctttcttagaatctagacatgatttcaaattttcttcagaagttctcttgaattcttacggaattcattaatccaaatgccatcctttcaaatattcaaaaagaaaatattctccaatgttgcttacatggaggagagttattttatctactagtgagatggaagtcgctaacaatctttcttataccccatagtattaaatagtaatgcaatttgatcacatataacattgctctcctgttgacatggaatgataaggaggaagggaatatctaacagcactttttagatattctctcatagaattgttaatgtgagcccaataacttattttgtaagttgagtgatttttcaaatataaaagtgaagcaaacaaaaaaagttacccacattcattcaacaaagctagaaatagagtatgtgcttcttgctttcttatcaaccaaaggagacctgtgaattacaggaaaaccatgtgtgaatacttcaaaggaaatatgccaaacacattgtgtgtgtgttttaaaagatttagtagctcctttaaagctctaagtaaagctgttagtctgactaatcatgtacccctgaaaccaattaaattttcagactagagaagtgttcttcaaacacttgaaaaaaataagagttccttcctaaagccaacaccttttaattaacaaaatactcagagcaaagctgtggtttgcaatagtatattacacctactgttattcatgctaccattctggtgtgccaaactcaattcatttcaactattttgagcttgattttctgtctgcttaactatggagggaaaaccacaattttagtagagtcattttaattttctaatgaatgcatgagaaaggtattatgctacatagtatgtcctcagactattcagatgccctctctctctcttgctctgtctctgtctgtctctctttacacacacacacacacacacacacacacacacaatgtgtgtatctatctgtctacctagatatacagtttaattttgtacattgtaatacatctggttctggcataaggtgattgagcaaaaaacaaacaaacaaaacccacccaaatctgttactggaggaacctttaatagcataacatcagaaagactattttcagtaaggaccctaggcaggaaaagacaattcctccaatggacttgagaagaatacccttagtctctgaggtggttagagaggctgagatctgaaccagctaataccagagccagcttcttgtaacccaagataggggcataagaaacggggtgaatgcccaggcatgaacagacttggggttaagattaaatagggtacacgggaaaggatttccgccagctggaggggaagccatttcccatgctccttagggatgacaacaggagacccagcccagaacatcattgaaaattctatgtaataatttatatatcctaactctttacccgttcgttctagattatggattcaggcactcttagcaaaacaaatcctctttcagtcttttaaaatattgacttaacaggaaatatccttggcacaacaatacgaccctgcctgacccttagaactgtgaacaggttgctcagactgtacaaaaccactaacaaatctgaccagcctacacttcactgaaaaaggtgatttgcatatatttctagtactatgacatggtggaaaagaaagaaccgcatatgtgttagataaaggtaaacgcatctgaaagtgcagtaagaatcaatgtgatatatacaataaaataagataaataggccgggcatggtggctcatgcctgtaatcccagcactttgggaggccgaggcaggcagatcacgaggtcaggagatcgagaccatcctggccaacatggtgaaaccccgtctccactaaagtacaaaaaattagttgggcatggtggcaaatgcctgtagtcccagatactcaggaggctgaggcaggggaatcgcttgaacccgcgaggcagagattgcagtgagctgagatcacgccactgcactccagcctggcaacagagcaacactctgtctcaaaaaaaaaaaaaaaaaaaaaaaatttcaggacttcaaaacttctgtcctttgaaacactttgattaaaaaatgaaaaaaatatatacatgcctgaatccagaggcaagtctttttagaaaacataaaatattttaagtaatgtttttctgaacagaaatggctctaatgtgagaggtcgatgaagattagcctcttgcttctttatgttttaaagtatattccttgagacccaaagtttctgactttagaatccaactctcaactactatcagctatcctctagacactttcaaaatcctccaaaacctaatagtggtgcaagattttgtccttcctagtgataactagatttaagtaagaaaacgttaaagactaaaaagtgtttaggacccacaagaaaggtgtaattctgttcctcatggagatattttagttacacacttcttattctggtcctccccaaaacacagaaatctagagttgacatttaaagagaaaatgagatttttgtctggaaacaggagagaaaaagttttcaagaagtatagaaagcgtatgaaaggacacaggtttgaaatggcctgtgctcatgagagaatgcacaatagacatgggtgtggaggagcctggaaagaatggagagaggtaagtctggagggtcaaatctggttcagagtacagagcataaaatcccatacgaatgtagaacatgaggagccaataaccattgtgtgagaaatgcaggaaaaagaggaagaaaaaaatccacatagtgtacttacagtcagaacaatcctaggaggtgacttacatgtatgatgtcataaaatccgtaacacaattccattagattggtactgttttcatagttacacaggtgaaaacttttgagggtcaagatgttcattgtagcaggcatagtataattccttacctcaagatgcctccaatgtcagtgaacattacttttccaagattgtctatttaggaaaaagtaaggccagttgtctatgaaggaagtactattataatcgccactttacagaggagtaaatggagattcagagaggttaagtcatctgactatagttacacagctaaaaaaaaaaaaaattatagagcaaggattcaaatacaacaatctggtcctagaaagcctaaatattctacaccctgctttctgattcagagctatttcctgcttttctcccttcgataggaaaaaaaatgtatgtgtgtggggttgggggcaaataaattgactggctgtattttctctctttaatatttgatctttcattgtctgctccaagcagtgggtcttcctccattatcttctcgtgaaaatagctaaaatcacctaactagtaaaaacctaggcatgttttgtgttctagcctccattcttccattctaatgggtggctgttaaattttagtactcattgtatgtagaagacctctaagttcactaaagagcttactgcacattgacttttctttagattcaaagggaatcaattgagcacctcctatactccaggacatgtgcaagatgcaagagatagagcagtgagaaagtctgataaggtttcccctccctttcccagcagtgtacagatagatgttcttcaggtggtgcatgctggagaagagaagaccagaaatactggcctgacgggtctatagatgagattatctgcccatgactggcgcagggatggccgcattgctagacctctccatcatcctctgaatatgcttcagctaatttatcatcccaatggcatatttagtcatcatgaaccattctctctttttgagtctcaggccctggccttgcttttcaatagacttccaatagattccttcctccttccttcccttactgcctggcttcctgacttccttccttcctgccttcctgccttgtcttgccttgcttttcaatagattccctccctccctccctccctccttcctccctccctccctccctgactttcttctttccttcttcctttctgtctttttccaaacgtgcttttcaggaaacagtggtctgcttgttgaagtctgataattctctagttcctcatccttcactttattgaaatttagtgtgacatgatcatttccacctcattaggtacttctttcatggtcagaagtaagtctggagaaaaaaaaaaaatctcttgtctctgctcttatttgagggtcaaattttcaataagtcactttttaaaaaagcattttctgacacttcccataagcttgaaatcctcctaaattgctgtatattgcctcagtataccttgtgtatctattttaggaacactccatccacatttgccagtcagcctggtgttctgcagttagttcctacagtgatattttaatttagctctcttttcatcctcacacatgcatcctctctggatatttagctcctttcctggaatcccttttaagatttctagatctttttgcttccatgatttcttctcctggactgtgacacaaaatgctatttcttctttacattacatttaattctttctagaaagagcctcagagtagtcagatagctttgagaaacaaaactttttctttattgcctcactgttactgcctttcaatcattgtttcgtgacacaaatttttttattctctctgacaattaaaacactatttttttctgtctgcattgatcaaaattagttccttcattcatagaaaactcttggtgtccctgagaagcttgagagacaagaaacattcttccattctactcatcttcttctctaatgaggagacaaccttaaaagcacagttacatagccataaaaattaatgattggctacctcagaatgaaaattcaatgtctcatttttttttaatattcttagaatcgttcactggttgtccagtgtgagtctcctgttgagatgtcttttgcagctttccttgaaacctttcattccaaactacatagtccaataattttgccaccaatcttctggttatattatgctcttgagtctgttgtctataaacttgattaggcattccttcccctcaccactcacctctgataacccagctgtgtgttggtatttagtatcaattcacaccagcaagttcagccctcttcaatcaatatagggccacacacggacttttgactgactactccccaagtatttcacattttggggccttatctccagtttctcaccacagttgttcatcactgtgtttcttactagccaggcgtttataaaaacagtaatacctaacactattgatcacctactatagtgtcaggcgctgtaataatattattgtgatgatgatgattatgctgctctttctggcattgtcatacgtgtattgcttgtactactcactgaatctacacaactgcccttatgacatttaccctgttattattcctcttttaaggtaaatacatgaaaaatgcttcccactttgccttgcttactgcttattgctagtactgaacaaatgttagaactgaaacttagagaggttatgtggctttaccaaggtcccagagttcctagggcagagaacaggattgtctaccagacattttaattctagtactatgcatcttaaccattaccataggctgacttactctacagtgtccaacactattcatattaagatttatttaatgactttgaaacagtatttcatgtctaaatagaaaaactactaactcgcatttttaagaaaatattgtatcttggtttttcttcactgctggccagtttactaacaatctgaaataaaaagaaaaaaatatgataaactgctcccagtataaaatacagagctaagacaagaacgtttcattggctttgatttccctagggtccagcttcaaattaatttacttcctattcaagggaattttaaatcagaaagaagatcttatcccatcttgttttgcctttgttttttcttgaataaaaaaaaaataagtaaaatttatttccctggcaaggtctgaaaacttttgttttctttaccacttccacaatgtatatgattgttactgagaaggcttatttaacttaagttacttgtccaggcatgagaatgagcaaaatcgttttttaaaaaattgttaaatgtatattaatgaaaaggttgaatcttttcattttctaccatgtattgctaaacaaagtatccacattgttagaaaaagatatataatgtcatgaataagagtttggctcaaattgttactcttcaattaaatttgacttattgttattgaaattggctctttagcttgtgtttctaatttttctttttcttcttttttcctttttgcaaaaacccaaaatattttagctcctactcagactgttactctggtgacacaacctgtggttactaaggaaactgccatctccaaactagaaatgccatcttccttgatgttggaggtacctgctctggcagatttcaaccgggcttggacagaacttaccgactggctttctctgcttgatcaagttataaaatcacagagggtgatggtgggtgaccttgaggatatcaacgagatgatcatcaagcagaaggtatgagaaaaaatgataaaagttggcagaagtttttctttaaaatgaagattttccaccaatcactttactctcctagaccatttcccaccagttcttaggcaactgtttctctctcagcaaacacattactctcactattcagcctaagtataatcaaggatataaattaatgcaaataacaaaagtagccatacattaaaaaggaaatatacaaaaaaaaaaaaaaaaaaaagcagaaaccttacaagaatagttgtctcagttaaatttactaaacaacctggtattttaaaaatctattttataccaaataagtcactcaactgagctatttacatttaaactgtttgttttggcactacgcagcccaacatattgcagaatcaaatataatagtctgggaattgattattatccactcttctaagttgtctgtgccaatttgccttctccaatgataaggataattgaaagagagctataacttaaaaagagaaaagtaacaaaacataagatatttaaaattaccctagatcttaaagttggcatttatgcaatgccatgttcaaatgaacatgtttttaatacaaatagtgcatttttcagcctcagtgtaatccatttggtaaaattatgacatcaactagaaacattagaatacattgatgtaaatatggtttacctagctagatcaaatatactatatatcttttatatttgtgaatgattaagaaaaataatgttggaattgttatacattaaagttttttcacttgtaacagctttcaagcctttctaaagaaatacaaagttgtgctgaaggtatttaggtattaaagtactaccttttgaaaaaacaagaagtgaggcagacagagtaaggggaatttctttgtaaaataaacttcaccaattccataggaataaaagtaatttgatagtaaacaacctgcatttaaaggccttgagcttgaatacagaagacctgaattcagtgccatttgcaaatgatgattgtggtcaagccatctctggatcttcgtttcctattctgagtacagagcatacagagtacacattcacattcacaatatagttatggatatggatgtatataaatatatgtaaatactacatatatgtacctaaaatttgttttacttctgctttaaaaaaagtaattatagccacatttttcagaaaaagtaactgaggctcatagatgtcaaattcccagtaagtagcagaacaaggattcaaatccaagtccatttgattcctaagcttgtgttattacttgctactgcagagagtatacgtagcaagtaatatatgtactgcaagcaatacatactattgctgcggtaataactgtaactgcagttactatttagtgatttgtatgtagatgtagatgtagtctatgtcagacactatgctgagcattttatggttgctatgtactgatacatacagaaacaagaggtacgttcttttacaataccatattgagttatataatactcccaggacttttatttaccaaaggaaacaatattttataatgtttaaagcccaggttttgaagttacattgtctgggttcaaagcttggctcccaagctgtgtgaccttgagtaagttattctgcctacctgagcccaagtttatctagctataaaatggggatagttgtactatctgccttgcagtttgtcatcaggattaagttggttggtacatgaaaaatgcttcccactttgccttgcttactgcttactgctagtattgaacaaatgttagtaattatatttggttccaccacgaactctagaaatctaaccaatgatggcatttgtattatgcaaactgtatatcacatcataatattatatggaaatgagagcttgtttccgcttctgtagcctagtctaccattgacatagcttcctgcagaagttaccagataatagattgggagagaaagtccacacttccttgtgacgggtttgtgagtccagcatttagggaagccattgatgtgctcagtagtctccagagttctctaaataaatgtgtccttttcagaaaggactactgatttgatgccccctcacagagatcgtctttaaatataggtcaaaaactaatgtagagggccaggtgcaatgtttcacgcctgcactcccagcgctttgggaggctgaggcaggtggatcacttgaggtcaggagtttgagaccagcctggtcaacatggccaaaccccatctctactgaaaataaaaaaattagctggtgtggtggcccatgcctataatcccagctactagggaggctgaggcaggagaatcacttgaatcctggaccagaggttccattgagctgagatcacaccattgcactccagactgagtgacagagtgagactccatctcagaaaaaaaaaaatttagggggaaaaatcaaaagccatttctgagacacaaaaatacaggatttataaattatatatggtatatataaaaatatttttaaaatagtatatatagcatattatatataatgatatgtaatgttcatatattacatatttataaaaaaatctaatctcccttctcttgcttgctgaatagggggatgctttgcctgcctcttcctcttatattaaaaaataattcttaaagacattgtcagttcttggcttttatagcctcaatcaccaaattgtcggtaaaatggccctaaataatcattaaacaaatgtgtgtgagaggggaaataagaaggataagtaagtatggggaggattttgttataatttcaggaaatcaatatcaattttatgtaaagttttaaataaagcaatcccaactttaatgtttgatgtgtgaaaaattaggcaaaattccaaaagggctttataaactgaaaaaaactttactaacacctatccatttttattattttaaccaacttctattgagctgccactaagtacctgggaaacataaagttgtacaacatagaatgtgcaggtaaaagaggttgaaggaagaaaataataacactatgatagagataaattttaggataatagctaacacatatgatatgccagtcattgatctaagtacttcacgtgaattctttaatgcttacaacattactgtgaggtagatagagaggcacagtaaggataataacctgcctgagatcgaggaagaaagacaatgatgagatgtgaactcaggcagtttggttccagagtcctctcccttaaacctcatagttttcaacttctctgatattgtgtgggtgatgctgttggggctttcttcagggaaaactaagccaggagagagaatggatgctagtgagatattcctgaagaaggaaaaacttaagccaggcattaaagaatgagttggaattacctagctagataaaacgagaagggcaatccaggcagagggaacagactgtgcttttcactgaggtggaaaaaaaacagagtatatcagaggaattgtgattccatatggctgaagttaagggtatatgatgaggaagaaattgatgaggttgaatagagaggactggggctaaataatgggaatcctttgttgccagactgaggaattttgatgatggcctacaggcagtggcaactctgaaaggattgtaaacaggaaaataaaatcatcacatatagtttagttgcctatcaattagagctctctggatgcaagcaacagaaatcattctctgattaaatcaggcagaaagtaaatgtgctgtaattagcacaaaggcattggaacaaaacttacaaaaggaaaaagaatctgagcatgcctttctgggcatgtggctagcaagaagtattccagtctgtttgtgatactctcttttctccatcctgtgtgtaactctgttcaaattttaaagtcttaaaagagagtccagttcaccttgtttgggtcacatgttaatacatgagctagaagggagcagaaaactttgatttaaatccctctcctcccaaagtctcaaaattagggaaaggcaattctcctgaatagaaactgggttctattgacaatagaagaaggaaatgattctgaccaaccactaaacaataattgtccactgaactcagtcaagaacatgtagaataagttggaggatagagcaaataaaggagatttgtaggaggtaattattatgatctaaagcaagcttgttcaactcatggcctgtgagccacatgcgtcccaggatggctttgaatgtggcccaacacaaatttgtaaactttcttaaaacatgagatactttttgtgacttttttttgctcatcagctatcattagtgttagtgtattttatgtgtggcccaggacaattcttcttccagtgtggcccagggaagccaaaagattggatacagctgatctaaagcaacaggttcatctactcaacttcacaacgtgtagacctgaaataaagaccattcatataccaatacctgaaatataaatttgtttgaccatgacacgtacagtaattggttctcaataaatgtggatagcttgatggataatgtgaatgcaatgtgataaggaaacttcatattcaacaaagactggaatgtgaggattataattccaaagcaccagaagatagataagataatgcaatgagacattttatgactcaaggcaaagttagttatgagattcagaccaaaccttagacgtgcagtaattgaaatatttgccacagaaggggtataaggacatgacattcaagtaagctaacctttcactagctttagactttgaactcagaaaacatatttggtgaaaagcttatggtcccctttagtatgtattgcttgattaaagtattattttagaaaatggtgagctgcttccattttgaaataaaaataatttttactaagtgaattatattcagtgaaaaaaatggaagctacaattacaactttaatttttttaagttttaagaatacagccatttaaaaaaattaagcaaatctgcttcattttagacagtagaaaatataccattatcttttagaagaatagagatgtgaaatatgcaaattaagcctttagaagtaaagcacacatgaagttcaaagtttaatttctagaattgtgaatcaatagcagtggatgatttgtactttatagcttagtgtcggagaaatctgattaaaaaatgctttttctgtttcatcacataaacataagtaaaattgctctgaaacaacaatatttgacaagaattagcagttttcttttttgacataatctatcaaatgaagggaaaaatatgtcctgggttttgctttgagagtgattactaaatctgacccttaaggaaaggaaggagagaacaaagaagggaggaaagaaagggaaggaaggaggaggaaagggaaaaaaagaaggaagagaggaaggaaagcaggaaaaaggggaaggagagagaaaagacaaaagaaaggtagcaaggaaagaaaaaaagacaagaaaggaatattaaagaggacaaaagaggagtgaggaaaggaggaaatggaagagggatggtgggagacaggagggagaaaggtggagggggaaatatgaagagaggttcccagcagtggagactagtgttgctatcaacaaatagaatttagatggccatatgatattatttttcataatactggtgtctgattgcctgtgctgagttaattgtagtcttttttttcaattccgtttggccaggtgttcaggataattcaccacaaaatctcaaccactgcacttgtattgaataaagaattgagttggcaaaggcattttatcctccagtaagacctttccagattggggttgagacaaattggccaatctggacaagatgataatagcattgttcaagattaatttttaaccacacattgcactgttacctgggagatttcattatctaaaaattgaatgagcagttttagtgggtatagtgtatatttaaatgggacataattacttgaatgagtttaatttttgttgttgttgttaaggtcaaagtacttaaaaattatgattttttaaaactctgtctatacacaaaaagcatttgaattagctacagaataattctgattataacttttggtgaatagattcagtcaaaatctgattactaaacaacttgtgtagtatagccctggaagaattgatgggacaatgtgtgggtaaagtggcattggctatttaaactaaaagcaatacaaaacagaatgtttcttggttttattctgttgtcacaaacccagcagaaagtggctattacaatagtttcccttattcaacaaatgagagaagttatagacaatttagttaattgatctaaagtcacttagtaaatgtaattgtcctaacataaacccagacccccagacctcttgggaatagataatgtttcttacttcttttctatttcctcagccacccccctcaacttcttacacatctcatttctccatccaaattataacaaaacaaagcaaacatggtttatttccatgggcatcaaatggatttcacgaggttgggtgacagtcatcttagggtgaggagattgattattctgtttttctctttcatcgatcaacaatccagcccttctcatctcatcatttcatttctgcacaaacttgtttaagaaataccaattaagaaattaattaagaaattaatgttgtaatctgtttggctgaagatatttacaaattttgtgctttaattatcttccaacaaatgtacatgtctctggtagacagcttgcgaccatctggatgactgatccatatttatataattttctttctttacctaatgagaccaaatccactattatcttcaacgaaggatgtaaagatatgtcagtgtcagtaatgtgacttattttatattctctggtcataacaaaaataaaccgccccttaaataaaaaggtcatagagttgcaaacacacacacacacacacacacacacacaaaatcatattttctaagtctcctaattacctttttatggaaaatgataccatatgcttttttcttaaagaaactacataaacttataaactatactaaactacacatttcaaagtctatgaatggaaatgtgtatcttattatattttaattcaattcactgtaaacttttctgtcaaaatcttatcaagcaaaactgatccaggatatttacatgaattctgatggaagtcactgtactgtgttttccataaaataccagtgggattctgataaggaagtttatgtttgccattgtgtttaaatagagaattctgggccgggcatggtagctcacgcctgtaatcccagcactttgggaggctgaggcgggtgtatcacctgaggtcaggagtttgagaccagcctgaccaacatggagaaaccccgtctctactaaaaatacaaaattagccgggcgtggtggcgcatgcctgtagccccagctactcctgaggctgaggcaggagaatcgcttgaacccgggaggcagatgttgcagtgagccgagatcacaccattgcactccagcctgggcaacaagagcgaaactccgtctcaaataaataaataattagagaattctatttacaaatttcctttcttggatctagttagggctcctttatatggagtgatttttattgttttcatagaaatacgtagaatctgggtcttctctaactttcttacaggaaagcaatgtaataaggtttttttttaattttctgaaagttatataatgttattgttccctaaagtttaggacctgccttttaggctttccatttcaccataacttttggtccttaaagtctgtaattgaagttacagtgtgttatgatgtaaatttttcttattattacctttaatgttagggtaatgttaactaatgttaatgttaggtatatggttgtttttttcattccttcgttcaacaaattgtctttgaaacccatgttacaaagcactctagagtcaggttgaagactattaagaaaggagaatagaaagagacactagagtaataatttggatttaaatttgatttccttgtgtatgatagtgaataagtgtgaataagatgaggcagtgatcacacatcactattagtaaaagtgtttctgtacctgtatccacacttttatgtatatggttacttatgttaaagtgatacatattatataaaattaacgtatacattaagtagatattttaatagtctgtaattaaatactactagtattttctttcctccttcaagtgcttacttttgatacctcgagttacagtgtcataaagattctttagaaatatattgactgtcttttaagagcttttgatacaatactgagtttacattcatctgttatttattgaacacttgctggtgaaaggcatcagtgttatctgctcttagggaacaaaaattaaaaagggataggccctaattttagagtgtatcctctataagaaaaacataaaagatagggcagtcatggccacaaaagaaaaaagtgttatggtggtttcaatcatatatgtattagaatgaataaatcaactgatcaattgtgatttcttattctaaatatgtgcctgcctttttcatatagatgaaaattaagctatgtttatctttccagggatcttgttgatttttattcaataacttgggagtgaaagttgatttttgcatatgttttaatgtttttaaatttcataaatgaattgatcagtaatttccaaggtagtaatggctgcattgtttttgaaaaaaaaaaagcaacaggatttgattgtgcttttatgatttttaaagaattcattaaaaataatgccacggtttctaaaatgatttgagtcaatttcttattcgatttataaaaataactttgaatacaattttagtaattcacaaatgctttcagttcccttacctttatattttatattctgtgtaaacaagtgacataatatttaagaattatatatctcctatgatttattcaagaaaagaatatatactgtattatttatttcaagaacagaaatgctttgatttaactgtcatcttctctcttcaattatggaagcaaaataaactgtaatgaccaatgtaacccctcccccatatcaagttaatctatgttcaactccagaattatttttgaacactcaaactagaaattaaaaaaaattaaatccatgaagacgatttttgccaaaagcatatagataaattgagttgattctatacttaagaaagtggagaggagagagtaatttggagagagtaatttactcttaatcccatattttttccctaaatgtgaaagaagtagattgtagtgagagggaaaataacctgtagcaacttcattgaggctaagctttctgtcatgttatattatacgaaagtaatgaaatgcttccacagatagaatcagaagtcccctctgagaaattctacataaaaattagcctgccactttaccacacttactcaagtttgatttttttaagttatgtaatagatgttaggcactagaagaggacatttactgggggcaaagatcagtagttggaaagaatgcaagcaggcaagaagctatatataatgagattttacagtacaattgttttctaaatgaaaatgaggacgggtccagacacaatggctcacacttgtaatatcagtgccaggatggaggatcccttgaggccagaagttcaagagcaacctgggcaacagagtgagacttcatctctacaaaaaaatgaaataaaaagttagctggctgtgatggtgtgggcttgtagccttagctactcaggaggctgaggtgacatgatctcttgggcccaggagttcgaggctgcagtgagctatgatagcgccactggattccaacctgggcaatggaacaaaactccatttctaaaaaagaataaaatataaaactaaaataataaataaataaaaatgaggatatattttattttaacatttggaaactttgtaggtgaggaccatgcaaacattcaaggtgtgagttctgaccaaatccaattattaaccataccaatgacttaaggtttcttcacactccttaaagttgattaatataatgattatatagttgactggtatgtcacagcttgaagcctttgagatttattcctgccttttctgtaaaggttgttttgttaattccagtatgtactggtcgtttttgttttgttttgtttttgtttttgttttgtttttttgagatggagtctcgcactgttgcccgggctggagtgcagtggcacgatctcggctcactgcaacctccgccacctaggttcaagcgattctcctgcttcagcctcctgagtagctgggattacaggcactcaccaccacacccggctaattttttttatttttagtagagatggggtttcactatggtggccaggctggtctcaaatacctgacctcatgatccacctgccttggcctcccaaagtgcggggattacaggcgtgagccaccgtgcccggctgccaatatgtattggtctttttcatcaatgattcagtccaaaatcattttgtcctttaactatatattttcttgtaaagctgcttctgttgtcttgaacttttcttttcaaatgtatgttgtcatttgactttttagattgttattttctggtcctcgaaataaatttaaatttcctgtaaaggaaggtgtaatattctatttgacatagccgctaaagatgtactaggtgctttataaatattgttgatttactttatcttcacagattactagttttacttagtatttggaatatgacaacattttatagagctatattcatatatatgtttatcttaactgttaaatgcaatatgattcatgtcttgttttggtcaatgatgaatgaaagtctcctgagaattaaatttactgcatcgatgcaaaaacaatcataattttagacactctaagaattttagaaattaaaggattttttttttccagtttactctgttaagattgtgtttagctatgcgtgacagcattctcactacagtggcttatccagatagtttctttttctcatagagcaagacttccagaattatgtgttccagggtcagtgcagcacctccaaaaccgtatgtcccaactttttcctccaaccccagtcatctccaacatgagactttctttttgttttgttttgttgtttttgtttttgtttttgttttgagatggagtctctgtcgccaggctggagtgcagtggcgcgatctcgactcactgcaacctctgactccctggttcaagggattctcctgcctcagcctcctgagtagctgggattacgggaacgcaccaccacgcccagctaatttttgtatttttagtagagacggggtttcaccatgttggccaggatggtctcgatctcctgacctcatgatctgcctgcctcagcctcccaaagtggtgggattacaggcgtgagccaccgtgcccagcaagactttttttcctgtggtctcaacatggctactctgcctccaggcactatgtctgtactttaaaatggaagaagggaaaatggggaaagtaaaagcatattccagctgtgtcagctcctgtttgtaaggaaaaccagtgcttttctggcagccccacacagaagagtttctacttgaacagtgcattaaccagaaatgtgtcacgtgaccattcctaacttctaaggatcttgggaggattgagtgttttaactgaataggtgtgtttctttcttcataattcaaaatgtgaaaattggtaacttagttataaaaccttgctagtctgaacagaatttggatttttttagctaagaaggaaagaaagggtatcggataggcagctggctatgctagccaagatactcttaataatgcacatttttcttctttggacataagcagttttaacttagctaaatatgatgtgattgttttcctgtcttcttagttctgtttaaatttgtttcagaaatcaaggaaataaaatggagaaaaaactctattattcatgtctatctttctgcctctgaatatttttatgttggagaaagagaaagcagtaactttcataatagcttacatagtctgacaaattctaaacatgtccgttagcatcaatatacgtggtattaggtcatcagtttttatattctgaattattaagacccaaataaacccactgagttcaagagaaagtatacactgagcaataaaaacattaccagttctagcaatgataatcaaacaagaaaacaagtaatatagtctgtttagaataacatgttttaaagatcaagtttttcttccttaccaatgttgcctttcttgtaacacttttttttccttcttgagataggctttcctatcttttgtcacaaaccccaatatttacatggccattcgtagtctattcatagcagcaccaccccatggcccaaacttgtagatattgccctccttctatggttgttctaataagaataaccactcttgtctctcataatctcagctgttttgtgccgttaaaatggaaaataatgagtattaagatactaactaggggccaggcgcggtggctcacgcctgtaatcccagcactttgggaggatgaggcgggcggatcacgaggtcagaagattgagaccatcctggctaacacggtgaaaccacgtctctactaaaaatacaaaaaattagccaggcgtggtggtgggtgcctgtggtcccagctactcgggaggctactgcactccagcctgggcgacagagcaagactccatctcaaaaaaaaaaaaaaaaaaaatactaactaggtttcagtcatatgagatgaataagtcctacaaatctgtacagcctagggcttgtagttaacaatgttttatatttaaaactttgctaagagagtaaatctttttttacctgttattatcgtacatgcaaaaataatagtaaataaggaaggtaagagaaaaattttggaggtgatgcataggtttatggcatagattctggacatgatttcacaggggtatacagtcatgcattgctcaacaacagatatacattcggagaaatgcatggttagctgattgatcttgttgtgcaaacatcatacagtgtacttacacaaacctagatggtacatcctactatacatctaggttgtatggtatagcctattgctcctaggctataaaccagtacagcatgtgactgtactgaatacttcaggcaattggaacacgatggcaagtatttgtgtatctaatcacatctaaacatagaaaagttacagaaaaatattataatcttataggaccactgtcctacatgtatacagactgtgcacatgatagtggtccattgatcaaaatgtccttatgcagcacataactgtaattatctcgaaactcatcaagctgtgttcattaaatgtgtatagctttttatgtcaataaagtggttaagaaatcaataaagtggttaaaaaatattttgactaggaaatatactatcatttctagttgataaaagatctcaacatttccaaaattgtcctacagaaaaccaggttcatcaggtgttcatacatgatcctcatgaaaaggtcaaataagctgaaaaacatgcatagacgttgcctatcctagcaatctatgatgtacatctccatagtaaggtcactgaaaagtcttttaggaatgttagtattgttagctcagtatttctcagtgatttctccatggaaaccatttgtgtagagcatcttgaggagcacagctgagagaacattatcttagttggatgtgtatgtccctctgagtcacttgatttctctacatatgcttttaccaaattaatcttttagaaatcttttctcttcgcactatgtctataatttgtgaagttgttaccaggataacatttgtgcctctcaccatgatgtacctaccagggtccaagcagccattccttctctagagcaactgtctgagggaaagaatttaacacagcattctacgaaatcattttatttataaaaatagattactgctttacatatagtaatttatatttagaatattgattaattattaaaatctgcatgagagctttaaagagtagtacataatatatagcagtttgtactcaaactgtcttctaaaaaggattcactttttgtttgtattctattgtcctattcgttgatagtgttacgtaagtaattataaaacttaaaatctggaaagagaatgtggactcagaatgccatctcttttgttatttcaaatggattagaaatgaacatacatattcattttctttcattacacatccagagaaatagaatggattttataaatatgtaaaagcaaggattttgatcactgataaaaagggaaggtttggtcactaccttatttcattccttttttcttatccttttttttttttttgtcaattatttgatgacatctctgaacatcaccttttattcatgacaagaattgggtatcatggtaaagaacactgttaatataattcagttacttcaccccctcctgaaatatagagaagctttaagactatgtgaatatttttttctggttttcttgtatttgtagaaatagcatgagctttgtttaaagtcaggcatctaaaaccttgccctgtatgttattgacaacctgcacaaattttaggatctattctattacagtttgttcaactgtaaaactaggatagcaaactctatgtcatattttcgttatcagaatttaaaaagcatgttttaagatcttagtaaataataaatctctactctgtagttgaatttgttctatattctttaagaaattccctttgatggttatgccaacctctgtattacttttcttcacactttaactttgcgctgaaatcatagtagtattttacgttatcagtcaaaataacagtcatccttaaaacaaatatgaattttagatgattaaatagatttgtatggaggttcttcttgctaatcatagcagttatccttggtgaaaaatgatagacacttgaaaaaaccaattaatcatgatggctatttttgcatcataaataaagctttcaaatttgagagggaatcaaaagggcaatggtagtatagtgtctcaaagcccctttccaattgatggtacaaatttaaaaagagagagagagagagaaacatgtttcactgtaattgttttctaagagcttccaaaaaagcgtattttcttaatagattcaaatttttcagttggattgaaagggaagtcttggagtgtagtgaggagggcaccttctgttgagaggtgttcagacgacagagtgtgcccaaggccaaagatgagatggttttgcgaaagtcagtggccacaaacaggtgtgtttgacccctgagagatatgcaggaagtctaccccactttaattcttccaaatattctttaccttaattcccaagtacttgataaaggagcaatggggagaaaatatgcacactattatggaaaagttttgacctacactttggagagttttagattaagagcattctagaaatcagtcccaaatgcctagggtttacttacttaaagataatatcatagtttgggtgactgggaagcataccctgagattgaggtgagcatgcagtatgtctatttaggagtgttcttggggtcaacgtgtaggggcagagggagaagttgagctctgacgcagtcttagtaagggcctcagctgaccgttcagggagttcttaagctggaatgacccttcagaagtgctaggaaacgaagaaaggggactggatctttataaccccgtgtcaagtcatgcactggatgtgggctactccaggaaggcaacgaactttagcaagatgattctctttagccacgggaatttccataagggggctgctatggtctgaatgtttttgtccctccaaaatgtgtatgttgaaacctaacactcaaggtgatggtattagaaggtgggggtttgggggggtgattaggtcatgcgggctctgccttcagaaacaggatcagtgcccttataaaagcggctccagaaagcttccttgccctcccaccatgtaaggacacaccgaagatgccatttaacaggagtgggccctcaccagacaatgaatctgctgatgtcttgatcttggaattcccagcctccagaactataagcaataaattctgttgtttataaattacccagtctaaggtatttagctatagcggcccagactaagacaagggctgacagctgaaggctgtctaccagcagcactcctagcagctggggaactaagtccttcatttccaaaggggaatctaggcagcatatttacagcttttcactacagataagctcattatttcaaatagggactagcaggaaaaaattaaattgcccaaaatttagtgggatgctgaaatagattgtggtgtgtaaattggagtatagtgaggagagcaccttcaaaccagtatgtactacatgatattgtttttgttgcaatatttattatatacccaaacacacatatattacttttagaaacacacaccacatatatatctatgaatattttatatacacatagggaaggattgttgatgttatttatgctattttaaagatcgatgttttcatataattatgtattggttatatattatttcttgatataaggtaaaaaaaaaaagcaaaacaaactttaagtgatcactatgaaaagaatcccaatgctgcacatttaggtttatccaactcttcccattaaaatattaaatagtagaaataattgtgaataagaaagagcagattttgaaaaatggaaagaaatgcttaaagacatagcattgttgcccaaccatcattatttaaacatacagtgtttggctttgaccaaattgccttcaaacacttccttttggcccaaaatgttaggtcatatatactaccataaaattcatgatgcttaccatgcattaatttctagtatataccaggcattgtgctatgcatatcatattcaatatttctaatcctctcaaaagtggtacaagctaactggcgtttttcttgttttgaaagggagaaactcagagaggttaagtgacttgcccaaggcaatgccattgataagtgccagattctatcacaggtttattggcaacaaaccatatgtgcgcgtgcatgcgcgtgtgtgtgtgtgtgtgtgtgtgtgtacacatacacgaataacatatatggtataaatacgtggaaacataataaactgcattgagctgcgtttataattagtatttaggacatgtttggcaaataaaaacagtggagattgaaatggatttgcttaggaaaaatgatacattaaaataggctttattatgagtcttcaactattctgtgaaaatagatacccagggaagaaataatagagaatatgaatcttgagcaggcaactgagaacttgtcgaagagccaagataaaaatgtcagagaggagaatattttggcagctcagatgagcccccagagggtgggaggcaatgatctcaccgcagtctcgtatctgaaccccaggtttttgcatctccataaagtaatttcttacacccctcaataatgatcgggcttactctcaatctctcgctctctctctgtgtctctctcacgcacacaaacatgcagaacatttcttgcacatgcataactcataagacgattatgtaaataccagcctttttatttcataactaaattacaaggcctggttattgtttggactgtgaaaaaataattatgtgaataggtgcctcaagatgaaagacaaggcaagattgtgaaattattcatatgatagtaatagtatgcaaaaaataacacaatctttaaagatctttaacgacctagttataaaaccatgctttataacaaatataaccatgaggaaataaaaagaaaaatgtaataatatactccaagaataaagtcaaatgtattgttgaatgtaaggagttggttacacttccttatagtggaggttattttaaaatttgtggcttacgtggtgttatgaattgccctagatcaacactattatgcaaggccaactattaggttatttttggtagataaccacagcaaaactttagtataataggtaaaggttagctacactcccataccctcactctcaggtgttgtcatactccgtataaaaggttcaatcaagggagacatgagaatattccagaatctagaggcaggatgcagttaaccttagagaaggcatcagacaactagaatcttcggattcaatgtggaaacaaagcatagtttaggcattaaatcttgggcaccattccaaagaatacaggttccataacttactatatttttatacctagcaagctagagatgaggaattgctctcaaatattttaaccaaagcatgtatcttaagtaacactaatctcataagtgaaaactcatttctaatattcattttgctcattagcaaggcctctagtgttgactgtgataaaaaatagttcaaatgctggtagaacccaccccaggagactggcctttctgattaaattctaactctatccccacgtgaattcctgacttaagtaactgagttcctgcacatcagaatataagtatattatagatataaaaacatatgtaattaataaatattttaagtgagacacttctttcatctttatggcttaactatatcagacatttgattatttttagcggtctaactacaaaacaaaacacaaagcccacaactaaaaatttctttgtatatattgcaaagaggcaaccatttggtgtcaattcaatcatgagtgaaatgctattatacgagtacatctccctggcttgtatgggggtaatagggcatggaatttacagattcacaataactgagatattcacaataacaaagatatcaatatgtagcttttcccataactttgtgtaatgaaatcctcagtttgtgctgtgtaaaaagcttattgtttacttctcatgaaaatcatcttagtttttatctttatttaatagtctgtaatttgggggtaatacattcgttttgttgatactatgtgaagtggcaagcagaaaattctaacaggaatagataagcaagtatcctataaatcagagtcagtgtctctctctctctcttttaatgagtcagtctgtctctctctctttttccctgcctggctatctatctgtatttttcagttttgctttgcaaataagagaattgtgtgttgtaaaccaaccaacttaccattaattttctctgaattcaaaagcaattacaagcggactcttgagtttgtgctgcctggttgtctgcatataggccagatgtctagaataggatctttatttactatttttaccctcctaatttcatggtaactccaaggtagatgatatttgtaatcgtacactacttgtcagaaatctttctaataacactgctattttataaaaataaacattaattcagtataaaattttattttaaattgttaattcaagcaaatcagtgaggtaacttttacactgccgagcgtacgtgtgtgtggattagtacagccatgccatagacttcacttgtaatcttttctttatattttttatacacctgaaatgttcatcattgtgctgtagaaaacaatctcattgtgtttttaaaagctagagtgggtattgagaaggggaagaggatcatagaaaaagttggttaacatgctacttaacacttcaaatctttactcgatgtcatcatcagcaacattttaaatttatgcttctactagtttgcagttcttttcctttgattattcttatgatacaagcctttccacacaaaatttatgtacaggaattgtgtagaatttttctttggaaaatatggtgatttattacaatttgggcaacatcatcattttaaaaattcagaatttgatttttctcagaatcatcagaaagaataaagcatatatatggttcatgtcaggagaattagaacatgagaattaatatatctctgatcttttaaaatattttcatgtttgtgaatcagcagatttttcctagtttgagatttaaaaaatctagatataattaaaatctcactgatgtttcaccatcagatgattttatatttgtattttcttccacttcataacttgtatagagaagaatagaagaaagaaaaagggaggattgataatctttctctctcagttcttatagcacttcattttttaaacttattacttccttctgcctgctttgtttgtctacatgtttgtatttcatgatttcttagaaatccatctactgccattctgaaggtcatttacctgaaaatgatagaaagcagcatatattcaaacaactgcagagtaattgtctatatcagttatcattgttcattacttttctgttttaggattgaggggctgcctcgccacctccctcacacccccagcatattatcacaaagcctactgattcattcacatccctgggctgaatttgccacccactgtgtgttcctgttgttttgtgtatggaagtgaaaagatttaatttgatgttgttgaaaagacacagaggctaactttcaattttcatatgtagttcttccctctccctctgcaccacctcctttacttgttgagaaaattgccctctccatggtaacaatagaagaagctttcagattttagtagtagttgttgcagagaaaagaattcaaaaagtagatgaagtttaaaaatgaaaaagagagaggaagacagctgggaagaaggcttaatgtttatgagtgggtgtggaggggaagaactaagttgaatgaacaaagctgagctaaggggaagatggtttttctgcatcccagaaggcaataccctagcctttcctgcagccttcactccccaaaagataagagctttatctgaaattcttataggattcattcctgaagagcagcttgtcaccaaacagaaacactgtgatttcctcagggagtcacagtttattattatttttttaatgtaacgcttttgtgaactccagtttccacctcaattcaaatggtcttttggttacagggtgaaagagacccaacaatacacctttcccacttccggaggcctttggttaaaccatgtctgccacaaggacacaggagcctggtatgactggttgttttttgtttgcttttttgcctcctgtgctttctagattgtgagatactgtaactcttgtcgatgacacatagtaccgaacccacccgaagaagtatgtcagtatgtcacattgtgacaaacagcttctcatgctaagtaaatgcagaaccattgtgaaaggtttaataatgcccactcctcccccgccaaagatgtccatatcctaatcccaggaacctgtgaatatgttaccttacatggcaaaaggctttgtattaacagatgtggttaagttaaaaatcttgacacggagagatagcctgggttaccccagtgcgcccaatgtaatcacaagagtcctcctaagagagaaggaggtgatgatacaagcagagtaaaagagagattggaagatgctacactactggcattgaagatgaaggacagggccaagagccaagaaatgcaggcaggctctaaaagctggaaaaggcatggaaaagaatcctcccctacatcccttagagggaatgcaagctctgccaacacattgtttctagcttgtgagacccattttttggactttggacctccaaaattgtaagataataaatttgggttgttttaagccattaagtctgtaatcatttgttacaacagccacaggcagctaatacagccatgaacatttagtaatgactaactttgcacaattttaatacaagcttcttattaaggtttattttttcttaattacaaggaataaaagtggggtctgggggcaatgtcatggtccactccgttttagccatatgaatttgtatttccagcattagaacaaaaggtgacaaatctgaatgtatttgtgtgaaataataataaagcagaacaaaaagggaaaagtgtccagctggaaatgaagttagagaaagatgaggagaagcaagccaattgtgtagttttcccttctgctttttaaaatcatgatttgtttaacccactgaattctattttagaaacaggactgcaaggaagtgttgatggatttggtggcatgagaaccagagtcacagaggcaggaaagtaaggaataagtgttagaataggaagcagagttgcttgggaagagaccttatgacatgtggacagggctagacttaggagtcagaaagacctgagttcaaatgctatcctttagtatagtttgaagtcaggtagcgtgatgcctccagctttgttcttttggcttaggattgacttggcgatgcgggctcttttttggttccatatgaactttaaagtagttttttccaattctgtgaagaaagtcattggtagcttgatggggatggcattgaatctgtaaattaccttgggcagtatggccatttacacgatattgattcttcctacccatgagcacggaatgttcttccatttgtttgtgtcctcttttatttccttgagcagtggtttgtagttctccttgaagaggtccttcacatcgcttgtaagttggattcctaggtattttattctctttgaagcaattgtgaatgggagttcactcatgatttggctctctgtttgtctgtcgttggtgtataagaatgcttgtgatttttgtacattgattttgtatcctgagactttgctgaagttgcttatcagcttaaggagattttgggctgagacaatggggttttctagatatacaatcatgtcgtctgcaaacagggacaatttgacttcctcttctcctaattgaataccctttatttccttctcctgcctgattgccctggccagaacttccaacactatgttgaataggagtggtgagagagggcatccctgtcttgtgccagttttcaaagggaatgcttctatagtacaaggctacagtaaccaaaacagcatggtactggtaccaaaacagacatatagatcaatggaacagaacagagccctcagaagtaacgccgcatatctaccactatctgatctttgacaaacctgagaaaaacaagcaatggggaaaggattccctatttaataaatggtgctgggaaaactggctagccatatgtagaaagctgaaactggatcccttccttacaccttatacaaaaatcaattcaagatggattaaagacttaaacgttagacctaaaaccataaaaaccctagaagaaaacctaggcattaccattcaggacataggcatgggcaaggacttcatgtctaaaacaccaaaagcaagggcaacaaaagccaaaattgacaaatgggatctaactaaactaaagagcttctgcacagcaaaagaaactaccatcagagtgaacaggcaacctacaacatgggagaaaattttcgcaacctgcttatctgacaaagagctaatatccagaatctacaatgaactccaacaaatttacaagaaaaaaacaaacaaccccatccaaaagtgggcgaaggacatgaacagacacttctcaaaagaagacatttatgcagccaaaagacacatgaaaaaatgctcaccatcactggccatcagagaaatgcaaatcaaaaccacaatgagataccatctcacaccagttagaatggcaatcattaaaaagtcaggaaacaacaggtgctggagaggatgtggagaaataggaacactcttacactgttggtgggactgtaaactagttcaaccattgtggaagtcagtgtggcgattcctcagggatctagaactagaaataccatttgacccagccatcccattactgggtatatacccaaaggactataaatcatgctgctataaagacacatgcacatgtatgtttattgaggcactatttacaatagcaaagacttggaaccaacccaaatgtccaacaatgatagactggattaagaaaatgtggcacatatacaccatggaatactatgcagccataaaaaaggatgagttcatgtcctttgtagggacatggatgaaattggaaatcatcattctcagtaaactattgcaagaacaaaaaaccaaacaccgcatattctcattcataggtgggaattgaacaatgagaacacatggacacaggaaggggaacatcacactctggggactgttgtggggtggggggaggggggagggatggcattgggagatatacctaatgctagatgacgggttagtgggtgcagcgtgccagcatggcacatgtatacatatgtaactaacctgcacattgtgcacatgtaccctaaaacttaaagtataataataataataataataaaatctcaaaataattaaaaaaagaaacaaacaaatgctatcctgatcctaactggctggctgtctttggggaagttggtaatcttttctgtgcttatttcctcatgtgtaaaaaaatgaatatagtacccagctaggtagagttgttgttgggattaaatgatgactataaagcatctagcccagcttcggctacattatagctgcttacgaaattgtagttacgatgtaaaagagaaaaacactggaaaaggaggatatgggccattttattccaccttcaccaccttttagcttggtgaccttgggcaaattatgcttcattccgtgcttcattttccttgtctataaaagggtgtaagtacagaaccattgaggggtggtcattattaacctacctcaaatggtgtctgtaagttaatatatattgtgcttttcctatgtacaatatctagcacataattacaaatcaaatccatcccatgtgcaatatctagcacataggaaaagcacaataactagttattactcttgttgtagtaattgctacgctgtaggagtttgaattgtaaggcagtggagagtcactgacctttacgagaaagtgtagcagaacatttgagtagatagtaatggggaatattacataaatggatagatattaggggcagatattactattaaaatattacagcatggatatttattaaggccaaactggttaattagttgcatctctcaggttcctaatgttgcttaattttttaacctcccattttgtgctgccctttgtacgaatatttaatgctcccaacacctcttcagtagcacatgtactgtgagtttgttttgttattacttgtgtgtattagcattcctttgtgaaccaaaagcatggaattagctgttgcctctaggctacctagttttgtagtttggattgaagccttcacctcagtaacacctattctgtctactatcttacagaaaacttgtaaaattaagacagatcattaatatagcagaaagagacaaagggcagagaacattgagatactggatattggaaccacccaatagtgttgatttatttatgattatcagtttttgtctctgcctagcctcatgccactaaagtctctgaggcaacaaagaataagcaattttgctcaccttatacaaataaaacacagaaaaaggaatcactagagaaatggtactgcagcctttctgcagggattactgcttatttttaaattacttaaaaggtattgaaattattgttcataatgagaaacctgcctaataaaacagaaaattaaacttaacacttccctataatgtaaacagctcggttaggaacacaacattacagaaaccacttaagaattgattgtacttgttcttggagcagaactagaagctcaccgtttagaagctgtgcacatttccctatcaaacagtacataaagtttccatattcctcagaatcggcttcatttgtgccatgtgtttgcttggaactatgccacagaaagcagttctccccctcaagctgggctcctttcatgccgcagtgcaagtgtgtgatatactggcaccatgtgctaatgtagacccatttttatatgataagaattagtacggcctagggaatagacaagtatgtctaaaatcctccccatagaatatgtcccttcctttaaaagctgtcatactgtaagttccagctgagttaaaggccactgtgctcctatagggaaatatattctattgtaatttttacgttctccaataacagtctgttctttgtttactgaagagagctttcatgtcataaaatggtgttttttgacagagaagcagaatcattgttttattatagaaatttgctcttacaacagcaaaaataaatagctcatctcttaagctcctgatcaatgtctaacacctcctacccccagcaacacttcactgcaagtatattaacactctataatagcaattccactcacctaccaagaaatgatcttcacaaatgatttacagctaaaccagagcttaaacacatagcacccaatcaagggcagatttttatctttttcccagtcatataagttctgagaagaaatagattaatgttgatctcccagacaactgctgagaaaatgtacaaaggatgttgtttattttgaagaatgagacctagttgttaagcactttttccccttatatgtacgtccaaaggtaaccattacaccattttgatgcaaatttaggatatatatttattcatacctctcttctccattcggatgttgtctgtgtgagtgctcacagacacatgcacacatacacacatgcactcctgtttcacacttatttgtaaaactcacaaggatttccaagccattaatatagcattgtttaaggtgaacacatggttgttcaccatccatatgtatcttcactttgtagcactcagaatttggcaaaatcagaaggctgaaacctcatggattaaatatattctatataacatatgtcttaattgctgttactgtaaagaaacctggactagccatatttgactaatttctacctaaggtatttgaattcttataaatagattcattgctttaatcacacaagagtggtttatatgaatgtaattatctccactttatagctgaataaactgagcctgattctatccctatatgggaaacatgaattgaacagctgtgccaattattttgataattcaaatttcacatctaccatgtgaagacagcagaagagggttagggggcttgaattattctgattaactgtgttcatgagtgtaatcgcctctagataatcactcatttcttcacttcacttcccatctacaggtagtatcagcgaatggtaacatctcttgctttgcctcagtttattgatggctgccgttagaaataaaaagcatggttttgtttcagtacttaaatgaataatatcttcaaaatgtttttaaaacgtgaaaaggttgaatgcatttttaacaaatgttttgttagctttgacttttatttttgaacagatgagcacaataccccagtactcctttcctagaaataggagtactacctgaagacttatttcccaaagaaaaatatcaggtctagtgcagcaatacgtattaagggcattgaaaagttatattcacaaaatgtgacatcataacatatgttaatacttcttatcactgataataatccttgaagttgtatttccagagagatctcaatttcttctcacactctgaaagtctctgtttatcctttagagtaggaatgtaagaatttaacaaaacattctgaatgtttaccttttttctaaactgaaactacaatccctttttacccctatatagtaaaatataatattacaagtagaatcagcaaatttgtttaataattctttgggacagtttttacaagcaatggggttgaatttatgttccttgtgtgcagtggagttattatattcttcttaaaaagatgcatgaaggtaaattagaaatgttttacatgttttcatgacaggacatttaatcaaagaggagatacaagaggcttttcttgggttactgcaatttaattttccatttctttcttggaagggacattggatgcagttgtacgaggttaatatttctaacatgccacttttattgtggcattcttctgctctcaaacctctgatgatttcccatggccttcaacatgatgtccttatttgggcatctagtgttctgagccctcacattctggccccagcttcccttctcaacttgatcacagccatcgtaattctgctaactaattacacagctgcccttcccactctttctcaaccactctgctgtattctgacttctacactttagttttaaagctactccttgtcctgaaattccttctcccattaggtcattattaattgagttcatcctctaagttacagttcatgttgctgttcctctatggcaccttccctgaacctggtcccatataaaatcccatctctcagaatcccattagggtaggatatgtggtctgtagactattacgtttgtcatttacatattgtcttctattattgggtaactgcgtgtgcgagcatgcatgggctggcctgaaggtcacctccccaactgcattgaaagttcatcacaagttcaattatttcactagagagtctctttcatgtcatccatgaggcacattccctactgtgatgtgttatgcatacaattatttcaataaatattttctagctctttgattgaccaaagcttaattacctgtcaactctagcctcttgtatctggaatttctacagtctttggatagtatctttaggatgcaaaattaggaggagtatgtaccaggcaaactattacaaataatgccctcaaatagttacatttcactattcatgtcttgtaatttatcttctgctttggtattttagtacacttatgattcaatttgctgtatagattcctctgaatagggacaagagaattcgtcttgataagtggaagttcgaaggattccaaaatgatgttattcaaggtagaacaagaaattaatactgaaaaaattgaggagtaataatccccaaatatgtacatgcgtatctcgttttattgggtttcactttattgcactttgcagatatttcactttttgtaaattgaaagtttgtggcaaggctgcattgagcaagtccgtcgggcacaatttttccaacagcatgtgctcgctttacgtctctgtgtcacgttttggtaatttgctcaatatttcaaacattattattattattatatttgttatgatctgtgatcagtgacctttgatgttactattgtaattgttttgagatgtcatgaactgcactcatatgagatggcaaactttgtggggtgcagtggctcacacctgtaatcctaacactttgggaggccaaggcaggaggatcgtgttagcccagaagtttgagaccagtctgggaaacaaagtgagaccctgtctttaaaatatatatgtagaaaaattaactgggcatggtggcacatggctgtaaggagccctgccagctgcatgggaggctgacacaggaggatcacttgagcccaggaggtcaaggcggcagtaagccatgttcactccagtgccctccagccagaatgacagagcaagaccctgtgtggaaaaaaaaaaaaagacaaacattttttcaactttgattttagattcagggagtacatgtgtaggtttattaccttgatatattacatgatgccgaggtttggagtacaaatgatactgtcacccaggtactgagcatagtaaccgatagttagtttttcaacccttgtttccctccctccccactctagtagtcctccgtttctattgttgccatcattatgtccatgacaacgcactgtttagctccacatgagaacacgtggtatttggtattgtgtttctgcattaattcacttagaataatggcctccagctgcatccatgttgctgcaaaggacatgattttgttcttttttatggctgcatagtattccatggtgtatatgcaccgtattttctttctccagtctgccactgatgggcacctaggctgacttcatacctttgctattgtgaatagtgctgaaatgaggatgagaatacatgtggttttttagtaaagcaatttgttttatttgggctatatgcccagtaatgggatcactaggttgaacgatagttgtgttttaagtcctttgagaaatcttcaaactgtttcactgtggctgaactaatttgcattcccagcaacagtgtatcagagttccctcttctctacagcgtcagcagcatctgtcatttttttgactttttaataatagccagtatgaatggtgtgagacggtatctcgttgtggttttgatttgcatttctctgatgttgagtgatgtggagcattttttcatgtttgttggccacttgtatgtcttcttttgagtagtgtctgtttatgtcttttgcccattttttttgatggggttatttgtttttgacttgttgaattgtttaagttccctatagattctgaatattagacctttgtcagatgcatagtttgcaaatatattctcttattctgtagactgtctgtttactctgttgataaattctttcactgtgaagagctctttagtttaattaagttccacttgtcaatttttggttttgttataattgcttttgaggacttagttataaattctttcccaagtctgatgtccagagtggtgtttcctaggctttcttataggattcttataatttgagatctaatgtttaaacctttattccatcttgagttaatttttgtatatggtgtaaggagggggtccagttgcattcttctgcatatggctaaccagccatcccagcatcatgtcttaaatacagagtccttttcccattacttattttcataagatggcaaacttaatcaatcaatgttttgtgtgttctggctactccactgatcagccattccctcatctctcttcctctccttgggcctccctattccctgagacacaacaatattgaaattatgccagtcagtaaccctacaatgtcctctaagtgttcatgggaaaaaaaagagtcacatgtttgtcactttaaatcaaaagtcagaaatgattaagattggtgaggaaggcatgtcaaaagccaagacaggctgaaagccagacctcttgtgccagttggccaagttgtgaatgcaaaggaaacgttcttgaagaaaattaaaagtgctactctgttgaacacaggaataagaaagtggaacggccttatttttaatatggagaatgtcttagtggtctggatagaggatcaaaacagccacaccattatcttaagcaaaaggctaatctaaagcaaaggactaattctctgcaattctgtgaatgccgagagaggtgaggaagctgcagcagaaaagttggaagctagcagaagtatgttcatgagccttaatgaataagccctctctataacataaaagtgcaaggcagagcaacaagtgctgatggagaagctgcagcaaactatccagaagatcaaactaacatctaagttaataaaggtggcaatactaaacaacacattttcaatatagacgaaacagccttctattggaaaaggatgccatctaggactttcatagctagagagaagtcaatgcctggcttcaaaagttcaaaggacaggctgactgtcttgtgaggggctaatgcaactggtgactttcagttgaagccagtgctcgtttaccattccaaaaatcctagggcccttcaggttatgctagatctagtctgcctatgctctgtaaatcaaacaacaaagactagatgactgcacatctctttacagcatggtttgatgaacattttgagccctctgttgagacctacttctcaaaaaaatgtgtctttcaaaatattactgctctttgacaatgtccctggtcacccaagagccctgaggaatatgtccaaagagaatgattttattttcatacctgctaacacaacatccattctgcagtccttggatcaagaagtcacttcaactttcaagtcttattacttaaatcatacatttcataaaggtatagctgctatattgtggtgagtccactgatggatctggataaagtaaactgaaaacggaaagtcctcaccattccagatgccatgaagaaaattcatgattgaggggaggaggtcaaaatatcaacattatcaggagtttggaagtagttaattccaacactcatcaatgactttgagggtccaagacttcagtagaagaagtcactgcagatgtggtagaaatagcatgagaaccagaatgagaagtggagtcagaaggtgtgactgaatagctgtaatctcaaggtaaaacttcagcggatccagagttgctgcttatggatgagcaaagattgtggtttcatgagatgcactctactcttggtgatgatgctgtgaacattgttgaaatgacaacaaaggatttagaatattccataaacttagttgataaattagcatcagggtttgagaagattgactcaaattttgaaagaagttctactgagtaaaatgctatcaaacagcatcacatgctacaaagaaatcattggctataaaggagagccaatcgatgcagcaaacttcgttgttgtcttattttaagaaattgctacagccatcccgaccttcagcaaccgccaccctgatcaatcagcagccatcctcactgaggcaagagcctgtaccagcaaaaagattatgactccctgcaggctcagatgattgttaccattttttttaggagtaatgtattttcaaattaaggtatgtacattttttagatacaatgctattgcacacttgacagatgatagtagagtgtaaacataacatttaatgcactggggaaccaaaaatattcgtgtgcctcattttattgtgatatttactttattgcagcagtctggaaccaaacacacaatattccaaggcagtcctatatattgtttcatgtctctctttcttctaaaatgtgtgtaggagaaaaaattatatcacttatgttactgggccataatatcaaaagcctgcgaatctgatgcacatgataaaaactggtcttaaacctgtcttgattatcctttgttaatatgccaaatttatagaacaatagagtttcaagaaatgtgaacaatgtagaataactaaaagatctaacgttgaatagctaaaattatcaacgccctttatatcactttagaaatgcgtttgcaaatcattatcaacaaattgtagcataaaattctttttttttcttgactttgaaattgtatttcaagatccgcaatttacaccacattatttacttactggcttgtgaaagtgaaaggcattttcatttttggatgttaagggttttagtaaatgacaagtaaatcaatcctttaagttccgtgtggtataatagcttggaaaggaccatcttaatctttttttcaacacagggagataatttattttaaaaataacacactaatagtagattaatattattaccatttcaaagaagtcaccaaatttggtaggcttaagaggttttttttttttttttgagattactatgctctttttttattttatttattttatatttatttatttattttttagttttttaattttactttaagttctgggatacatgtgcagaacgtgcaggtttgttacctaggtatacatgtatcatggtggtttgctatactcatcaacccaacatccaggttttaagcccccaatgcattaggtatttgtcctaatgctctctgtccccttgcccctcaccccttgacaggccccggtgtgtgatgttcccctccctgtgtccatgtgttctcattgttcaattcccacttacgagtgagaacatgcagtgctaggcttaagagtttttttaactccccaaaatatcaacaaattgaaacattactacaaagaaatagagaaataaatttcactgactgtcttattgttttttaagtttgaatagctaataatgatttcttaaacagctatcatattttttatttttaaagctagccaaatgatcagtgatttttataatactgataaatactgcttagaaaaggaacatgtgttctagcaatttccacacatttctgattctaattacttgtttctttttgttttatttttatatttttaagttttgtgagtacctagcaggtgtatatatttatttggtacttgagatgttttgatacaggcatgcaatgtgtagtaagcacatcatgtaaaatggggtattcaacccctcaagcatttattctttatgttccaaacaatccaattatactcttttaattaatgtaaaatgtacaattaaatcattattggttatagtccccctgttgtgctatcaaatagtaggtcttactcattctttctaactaattttttgtacccagtaactatacctacaccacccccacctccccacgacccttcccatcctcaggtaaccatccttctactctctatgtccatgagttcaattgttttgaattttaaatcccacaaataagtgagaacatgcaatgtttgtctttctgtgtctgatttatttcacctagcatactgacctccatttccaacaatgttgttgcagatgacagaatctcattcttttttgtggctgagtagtattccattgtgcataggtaccacatgttctttgtccattcatctactgatggacacttaggttgcttccaaatcttggctattgtgaatagcgctgcaataaacatgggagtgcagatatctcttcaatatactgatttattttcttttgggtatatacccagcagcgggaatgctatattatatggtagctctatttttagttttttgaggaacctccaaacggttctccatagtggttgtgctaatttacatttccaccaacagtatacaagggttcctttttcttcacatacttgtcaacattggttattgcctgtcttttggatataagccattttaacgggagtgaggtaatatgtcattgtaattttgattttcatttctctggttatcaatgattcagtgatgttgagcaccttttcatatgcttgtttgccatttgtatgtattcttgatctgccacaagtctctaattacttgtttcttgtaccactgtttcccttcattgtagtcagtgatttggtcaatcaacactttttacgtatgggtatctgttaactgtatttctaggaatggaccaagaattgagaaatttatcccaaccagaaagaacaaaatctatggaggcacaggattactgaaagctttgctcctatagcctcagtttttttctgcaagttcgctgcttcccagttgtccttgtgataaaattcaaaacctcaaactgatttttaaaaagccaactatatactgcttctactatgtctacctaaacttatttgccattatttgtaaagaattccaggctctaaccagcccatttgaggctttattttacgttcatgcctttgttcatgtctgtctttcccttataatgctcttctcattctctagccaaatctgccaaagttcagctgtagtgccatacttgatatgaagtctttgctgagaattcccatatgtggtcatttccttcactgatttgtttcaatagttgttgccattattattattttttttatactgttgctggatactttcgcagatccaatctctaacctgttgttctaccctaggaggttgaccaatatggcagtagcattgggcttgcttgtctattggcttggtccttgtgttgggaggcatcagcagatcaatggatgagaggagagtgagtcgagggatggctaggttcctttactcacagccccagctcctgtcaagaggtcttgtccctgcagccacttctcagattctactaactataccctccccttagcctttcaggccttgaggaggaaagcctcctcatcccactttgaatgaactatttattgcaagaaccatgactgattcagaatataatctgtccttgaatgaaatagttaatttccccttttgtattctcgtttcatatccctgtccctttatccattcctatattatatcatactatcatatagctaccttatattatactatgacatgagtaccttgtaagtatatcatgctatattatagttcttaagtgtgtgggctttggggccaacttacctatgttagaagttctgccacttattaccatgtgatcctagacaaattgtttaacttctttttcattcattttctttactagtaaaataggggcaatattagtacccacctcacagagtaatatgataattacattgactgatagtttttatttaaaacttttattgttcttactatgaaatgggaaatgttctaaacaccttacaaatattaactctattaattctcataatgaatctgagaggtagagactcagtatctccatttcacagtgctggaaatgatacagacagcatttaagtaacatactgaaaatagtaaaccgaataggtggcagccagtatgcaaattgggaaagcctgactccagagttcattcttttaactagtatgctgtgatagactcttttggcatatggtatgcactcaataaacaactattgttgttgtcgttagcattacttcccattgtattattacacaaaaaataattgtttatgagtatttgtttgctagattataagttccttgaaaaaagaagacaagttttatttgtctatgtgtactagctgagtgcttggcaaatagttgcagtttagtaaatgtttctaaaacaaattattagttgtttcttatgtatttcccaagtctatcctagccttggaaacagctaacacttagctaaacctagaaatgtcatttgagatttcagcagccatcattgttgctgaagccacaggttctcctttttatctccaatttcttcctcagatgattcaccactttctttgtcgtttccctacttcatttttcctatagtgacttttgttctccaataaccattgatagtgatgacagtcccaccttggaaccacttctaactgtcctgttcagcttttcctgaggccagatttcccccaaaatacattttttagcttcataactgctccttccagaaatttgaaacgcattctcaggaattaagcaagaggcatttgattgacgtcatttaatttgtgtttaaatgtgttcttcccatcaacgattaaccagtgcttcagccaagatacataacttttattctccactaaccttagggttgaggtcacaatcaggtacgtaatctgtagagcccagtgaaaaatgaaaacgcagggcccttggttaaaaaaaaattaagaatttcaagatggcaacagtagagcatgaaaccaagtatgaatcccttctaatgcagatccttgtgtaactaactgcacaagttatacgttcaagaagctggtcctggttgaggtctttgtctacctagggcacttctcactcagagaggtggaataatcttaactttctgtcttccgtcatctgaaaacttgccccaaagttccttttgccatctcttgcagcaaacctagtggttgttatctgttaaggattcctggtggcttgctttagtttcctacagttcttgagctgcatgtgttgaatggaactccaccattaccatgtaacacatctgaatactcttattttcctccagttaaattctgcgctccttggaaataatggtcatgcaccctaccttagtgatttctaaatagaggtagtatgtaaaaatacatatttacttgaattgcatcttaagaggccagcccatgggaggcatgaagaaacctatgttactaattaatattcaataattgacagttacacattcaggtagtagtgtcatggaaccatcacgttacatggaactgaagagctgatgagaggtttagggtctaggaggacaaaagtgagtgtattagtcagggcctgaggttatatgtacccagacaggataaaatgggacaatattttattagtggaaatatctatgtgaaagaaaagaaggaggaagccaaggaaggtgcaagagatgttagatcaagatgcaattctgactctgcaaggaagagagagggagagaaggctaggcagaagcatcccagtgtgcggtctagtggaaggaaattttggcaaagctgttgggaagtcattgaggcagagccaggcaaagaagtcccatgtctcccaaggaaggctctctgccttagtattcccaccacacccaatcattgggtgaggagaagtctgtgagaagcttggctttggtgcagtgcaatcatggatttcaaaatgcagtaacaggagtcctcagtcagttaagacccaataatagaaggcctgcatattctcatggtggccacttgggtatgaggagcagtggtgtttaaaactgttttgtataatttaaataaagaaaagctgaggactacttaagcttgattccttcagaagacagtctttggcctttatatttcatgtgatatctttgccatatgctctgataactctccatgtttcccctaccataatacctcaggttgttgcaattgcttttttattgcctgtcatcactactcgtttgttttctctttgagaacaggaattattttctccttcactgctacagcccctgcacctagctcaatgagtgacacaacagaagcacttaaaaaattgctataactcaaatttgggggatattctacaaaatacctggcctctgttggtcaaaactgtaagtgttataaagttcaaagaaaggcaaataactatttcaacttaaaaaagactaaggagatacgacaactaaaagcaatgcgtgagtctggaccagaccaggaaataaaaatatagctataaagttcattaatggggtaattgtcatactctgaatatagagtatggataagattatggtactaaagccacgctaaatttcctgactttgaaactgagctgaggttatttaagagaatgtctttgctattaagaaataaaacctaaagtatttaagggtaaaggggcatgatatctgcaaattattctcaaatgattcagaaaaaaaatatatatatataaaacattacatatacagttatatatctatacacacagagagaatgataaaatgataaataattaaaaataatgtggcaaaatgttaacaaatggtgaatccgggcaagggttacctgggagttctttatcttgcaaatattctgcaagcttgaaattatataaaaataaaatgcatcttataaagtatttattcagtgaataaagaacaaaaaaggctaactgcagttggaagatatttatgaagttggttatgaagattcttaagaagttaccgatggaggtgctagtagaacattcaaaaaagaagtagggaaggttgaccaagtaggaaaatatcaatatccaagccagtataaaatggaaatgagaagtgaggaagtaagtggaagacaatgaggatggttttcgatttggccactctatttggagaggcagccgaatgcaagaatagaagccagaagaagatgctcagtgagatggttgaaagctagatagattacagcatcctcaccagtaaaaccctttcggtaactagaaaggctacaatttagtaccttcctgacttctatgcttattttcttcaatacataaaatggttccgtaaactcttttaccttctgaattctttatattaattttttgaagttgtaaataaaatagcatcagttctacattgttacatttcagcttaattcatattcatttactgaaaatgggaacatttgaaaaatcatcatgggcatttatgctatgtagattgttgatttttatagaaaaatataaaaatatgaccagtttgattttcaaagtcttttcttagacatgtaaatactaagcattcaactcaacatatagagtttttatttgagtattatttaggtggaattctattttaatgaatacaataaaaaattgtaattttgtctaaaagcctaaaatgccctagttataatatgtatgatttcactgtttaacttcctatttcatagggttgctatttataaccacttcactcaactctggggggacttagtgagattaaagacttctgattcactttgtatttgaagaattttttttcctccatctttgctcagctagtggaatccatgatgaattctcatctccaaggggtaagcagtttttagtaaagcccagtagctgacttatgactccttagaaatagcattgattccttccttctcctgtgttttgtttcctctagaatgatagaatccatgtagacacgatccattatcatgcttaggtactggtaagcatgtaatgattttagttttgttcgctttaagttatttgtgtcacaaatatctgggatcatatcagagaaataaataagcacaattagcattctacttgtttgttatgactaaagctaggttgaggaaacagaaaaggaccagaggtcatatgaggatgaagataatactaggaacagcatgtttgggagagtaacatctggtaggggtagcagattgggggcagagaacagaattttatagatggatattttggaggcaagtagtttgagtaatgattagatctaaggtgttttctcatctgtgggtggctcgaaggaatagaggtgaaggtcagtttatttgagaagttctggaattataaaactaagttgaagtcaaagaaagtatagtagcaaataaatagaatacccttaaaaggaaaccaaatgaaaaataatcgttactctcaccatatgcttgtgttcttattagcaagaaattcttttaaccactgtttttataatatcttaatgaaaaaatactgaagcgtatgccatattaaatccctctctttatttctagaaagggaatcaaaggagaaaattcccattctgctatactaaaagaccactaagtaaagagcctattagtgtatgataaatcccatagcaatatacattatcattttacagcttctttgttgaaatgaatgtttgtatgtgttgaccatagagtgggataaaaagttgaaattttgttttgaaatattttagaaatgcatagttgtactgcagttgtgaacctccttagatttttaaggaggctgcttcaaaggatctcattaataatcttctcaggtgcttacaaagcatgtgtctgtcagcagaattagagaatcacccaactagagaacaggtttcacaataccctgagacctattttgttcattagagaggaaaatggcttgttttgagtctaagttgacatgcttgctaatttcagcaataaaagctgttcattgtggtcaggtttaatttagagcctggtaaggttcagattaaagttgatcaacttacttttacaacatacttcttaaatgaactttgaaatcttaaaagaaggaaaaaagtatagcaaacagtgaataatgtatctaaaactgagaagcaaaaaaaatctggttatgtgagagtgaattaaaagaagaacaacccaataaagataatctttgttatataaaaatttccaagtatcgaaaagcacgatttttcatgtgagttacacactataccgaatatatttgtccactgccacatgcatagtccctagaatagtgcctagtgctgaaaaatatttattaaaatgaatggatgagtaaatgaatttatgtattttgccagccctgtgtatttaaagttctctgttaactttgaggtgaaaatttgacttcatctgaggtttctgggtaagtccgttttaaaaattctattgaacatattcaaacattttagggtaggcaattccaaagcaacctttcagcttcccatgtcacagatgaccagagtttcacattctaacactggaaaacatcttatttcataaaatctacctgctactatatggttcctactttaaaatttgttcagtactctccagctgacttatgccacttacttcaatagctgtctttggcaatttgttccatatttcaaacactctgttgtgtaaagaaaccataaaagttagaaacctgaaaattggattttttttctgagcaatcacagcttacaaatgtggaaaatttgttaaaagttagcccctccaatttttcaatacagagaggagaaagtgcctaaagtagatgtacaatgtttggaaaagttttttgcattattttactattaccaaaagcaattgagtttaaatcacaaagcctgtctccctacctcttcacagaagaaacactacagaatgatcaaaatttggcctttccaaaaccaaaattcgttagaaaatcagcaggagtcaaagtacagagtaaataactaagtttcatataagtttcagatacattactatctaccactttcatctcttcatcttcattggcctcatgtggtagaacatcatatttaaaattatacaaacttgctggcttgtttactagtgtggttattataagaaaaaaatgagaaaatatagataaaacatctgtcacatattgcttataaactaacagtaaatattacttgtattttccccaattaaaataaaatttactgagttttagaaccagagctagtcagatgcctttttttcataaatttcttcataaatacctctgagattgtggtccttaaatctagagagactaagatgacagagaaaatagacactgaagaaagggaagaatatcttaatgatttacattactacctataaattaaaaattgttaactttattatatttgtatttttatttaaaatagtgctatattaaagtcatttataatacaggggaataggaatactaacctgtaatctgatgctctccaaacttgcctaaatcataaaagttaattagataatttatttaaaatgcaagatttgcagccctttccactacatattcattagttctggagggaggcaaaaaggtttggtgattcttacggacaggcagcttaggagaaaagctgatttagctcgtctacttcaccttttcatttgacaggtgagaaatctcaggggtacaatgaagttaaataagtaatatctcttaaatcggttctgtgctttttctgtttttaaaataaatataccttaattttgacgtcacacagaatgatattataagtataaatagttatctatcttttaaatacattgtcgtaattcagaataacatttcttactcaaggcattcagacagtggtttaagtaatccgaggtactccggaatgtctccatttgagcctttaaatgaagaaaatctatagtcaagattttcatttgaaatatttttgatatctaagaatgaaacatatttcctgttaaattgttttctataaacccttatacagtaacatcttttttatttctaaaagtgttttggctggtctcacaattgtactttactttgtattatgtaaaaggaatacacaacgctgaagaaccctgatactaagggatatttgttcttacaggcaacaatgcaggatttggaacagaggcgtccccagttggaagaactcattaccgctgcccaaaatttgaaaaacaagaccagcaatcaagaggctagaacaatcattacggatcgaagtaagttttttaacaagcatgggacacacaaagcaagatgcatgacaagtttcaataaaaacttaagttcatatatccccctcacatttataaaaataatgtgaaataattgtaaatgataacaattgtgctgagattttcagtccataatgttaccttttaataaatgaatgtaattccattgaatagaagaaatacatttttaaatcaattcagggcttatatagttgcaaagcatgcattgatgggtgtggtgaccacagtgtggcagaacatttgtggcagaacatttgttctttagttgtcatctgggctggcatccatggagatgccagtctctccctcatatccttggctgttggtccaagcaggcagtggcttcttcctgggccatctttcattcccatgtgcagtgactttcagatctggatatctctccgctactttgatgcccccattttgtaatatcaaaaatcatcgtactgtaccttatgccgtagtagggtgggcaggaactttggtaagacccatctgactagacgctgtgcatattcttttcttctgacatacactcctatccatttaatggggagagtgattcgcagtgattgtgtgttgtgtcagtgagtttccatggggtcaggaagagtgacagacgaaggagtaggggaaactcgccacccggtttccctcagagattctcctcagaaatgaggtccaagtcagctctgctttcaggttctctcagatctctctcggtttcttcacttctctctaccttccttccctccagggacacacactggtattgaattttcttgcttcctctgcaatatcccctcattttccttcccacaacccgaagaatcctttgtagtgcaggaaggaggaaaacctttcagccatctttttttttctctttgaaatcttttgtcttttaccaggcttagacttttcaaactcggaaaccatgagagtctatatcttcataatttatattctgctatgttaacccttccctaaggaaatgactagttgtcaatatgttggggaaagtgaaagagtaaccagagtaaaaggttaatattttaaaatattattagtcatacttccacatattgggtaagtacttattgataatagctagtatttattcagtacctcataagcattagatggtgtgtgcacatgtgtgtgtttctgtgtgtttctgtgtgtgtgtacaaaatctttacagaatcttgtgagctatattttataatccccattttatagacgagaaaacaggttccaagaacagttactcggccgggcgcggtggctcacgcctgtaatcccagcacttggggaggccgaggcgggcggatcacgaggtcaggagatcgagaccatcctggctaacacggtgaaaccccgtctctactaaaaatacaaaaaaaaattagccgggcgtggtggcgggcgcctgtagtcccagctacttgggaggctgaggcaggagaatggcgtgaacccgggaggcggagcttgcagtgagccgagattgcgccactgcactccagcctgggcgacagagcgagactgcgtcgtttacaaacaagcaaagaacagagcttggaatttgtaaatgtctctttctgacttgaaaatctgcgctctttctagtatgtttaccatttcccatcttgttttgttgcttttgttaatgaccttaatcattgtactaagactaaatacttcttttgtctgaaattatgtatgttttgattcacttcctaaagacatgtcttctttcagttgtagtgattgctaattaaaataggctgttcttggttttgaaagtttaactctttattgttgcttaaacaatgaatgtggatgtatgctaatgtattatttcagtaacactagccactataacaggtaatctcccaaatcttggaggcttactacagcagaaatttacttcttattttagtgcagtccaaaataagcagccctctatgaagtcattcaggaacccaagctccttccatcttttgtgtccagagcataagactcatatgcatttaatgggcagatgaagaatgagtattactcatgaaaatttgtcatgagccacgcctggaaatggtgtgtgttaattttgttcatattctgttggatggatcttgtcacatggtcacacctaactgcgagggaattagggaaatagtgtacactgttgagcctaggaagaggaacagatttggtaagatagccatacaattgatttagcagagcattcctccaccatactggaaccttgagggttctccaacaagttgcaacacactgacccaaaagagtgaatcttagtgagtgatttactcaatatgagactgaattcccattacacaggtaagtgatcagtttcttgcctgagaaatatggaaatttggcagtgaggtttatgcaaatctgaacatactatacagagagtcatttgttattttactaatgaaaaatcacttcaattttttccctaagaggaagacaatatgaatgtattatacagtatttgttcaacattgtctgaacattttccattatcccctgcatttttttttcatattgcattgactttttcatgatagagattaaaattgaatgaccggagggcaagtttgtatctctctgccaatattcagtgatttgaatagttcttcttttctaagcttttgtcttttaggaatgaatacctttatgaatatttgcagcctagtggaaaggctgtaatccaaatggtccaagaaagcattttcttaaaagcaagtgtctgtcgagatgtgtcatagcgcttattaagagtctaagctggaatcttagttccaaatatgcctggagcctctaaatggtaccaggataattctgacaagatatgtttatctaaacaatgtcatttgcagccctgctacacttcagtttatctctccctttgaaatctataaaatgggatggaaattcaatactcataaacttttcgatcgtgttcaaaatagaatttttcttagtaaagatttggttttcaggaaaaggacagaaataaaatacttgctcataaaattgtattttctcatttgatgattttggtcttcctttttattgccatgaaacttctagaaatgctcaaaaagaaatcagctaaataaagaaaaaatagttaatatatgtatgtaatactatattgaaacatttttctttctctggtaaatcccatttcataactttgaacagttgggaaaatctatacatagttattgcagtctatcaagagaaaagttcagtacaaagctatttatgtctactagaaatattcatgttaaacttcaagtaattgggtgtgcaagccaccaccatgttttactatatgaaactattaccgtggtatctgttgtattcaggtaattatattgatggaaatcatgcagtaataatctaggtaagagagtaaattttgtctaaatcagatcaaatgaaaaattctccctctttctaatattcgaattgctcatttttctttaactctttggtgtctgaatttgtcaatcattcctggccattttcttctgcaaaagggctgggtcaggggaccaaaagcagataagattagaagaatttaaattttcttccttggaggcgtctgaattacatgaaactcttgttcgtgtctgttaatactgcaaggcataataccataataccttgcatagcagtgaagaggatttggaaagataaaactgcttccttttatcattctgtttatttcacaaacaatattggtgaatgtcgttcctgtaacatttggatttaagagccttgtttctgtagcttctccctccgtaacccccaccactaccatttcggggctatacagcaatagcatgcattactttaaaaggcaggctgcctagactggccacttgttagctttgtggccttgagcaaatgactaatctcagtaaactatctgctcttagtttccttctctgtaaaataggctcacttataactatctcatgggttgggaggattagatgaaataattaatgtagagcccttagatcagggccatagtaaaagctgaatgaatgttagcatttgttattttaattataatctattggggtgctttgaaggcttaatgcaaaatacttaatgagctttttggtagctgtttagttatttcgccccccaccaccaccccaaaaggagagatttaaaagaccgacaggagaaggttgcttggaaaagatggaataagatctataaatagaattaaacaaatattcaggaaagccttttgtgggaaatactgcaaaatttttattatctataaatttaataggtagataaaattactactcccattttagagacagaaaaccgagactcggagagctaacgtaacttgtctagggtcttaggaagatgacaagtgaggaagtagaattcaagcccacgtctatatgattttaaagcccgaggcacatcaaatggaaaaggctggttagtcagaaaaataggaaggtatatttatctgacaacttaaaatattaggactaacctcaggtaattatagtctggatatacatttttgctgctcctgtttatacttttgacttctgtgtatttgagtgtctaatcaaaggattgtcttttacatgtgttggagatgtacagactagtggaccccaatgatctattagctgtgtaaccttagccaagttaattctctttcctaaactgtggttctctcatctgtcatgtggggctaataatagtacttatgctggtagggtgattaagaaagtaaaataattggtgtttctaaagtaaatatgtggcacatattagatgctcattaaatggtacatattgttatggtgagatggatttggtacagagagaactggagatgggagaatatgaagggtgtataatgtggccttttattagctaaaccaagggaaggacttctgaaacagaattccaagttttaagagggagtcgtttattttggaattattttttcagctaaggatttttcaacccagtccagaattcttagagaaatttagtgatagcttataaattttaagaaaaggaattcacattatattgcataaagaactggtatacagggccatagaaggggagaatgttcttctgtatgagaataaaaaaaaacatctctcacacgatttttgaattaactgacagttttatagcagctttgtcaacccatcattcattgctgcaaccaaatctatgaaatccttcatggcgaaataaaaaggctctgttgttctccacatttgtatgaaatctctgttgctaatgaaatgccagccagtatcttcctctcaggtattgtctattagatggttgcttattttagaagaagtggagtcaaccatataaatttccttcttttgacatctagcacctgctgtcaacctgttatagctacaagcagctctcaaaattcacatccactaggatgccgctggcaaccaaagagttcagttcagttcagcgaacgtttgaatgcctactctgtgctatctaatatcagagatggtagaggggatacaggaaaaaagtaagattcagcctttgtctttaaagagctcacaatcaaatgtgggtatttggacaagtatatttaggcaaggcagtttaggataggtgcttcagtagagcagtattacaaaatgttgagagaaaactagaggaggagttttaaatgagggcttagtggaatgcttccaggaggaggctgaatttgacctggtcatgaataagactttgaaaagcagaaggaagctggagagggaagggtatttcaggaattgatgacaggagaatacataattagacctgttaacagtggggtggaagacgaatatcagcatgggagtgtgtgtgtgtgtgtgtgtgtgtgtgtgtgtgtgtgtgtgtgtgttgtggaggataagggagtaaatgaagtcagtaagaccagttagaaggcaagagagcccaagctggagcagtgaccatggagtaaaaagaaagaagtgaaattgagacataaggtggagctagaattaacaggattttgacattgattgcatatataaaactgtcaatctaagagaaggcctgcctctaagagttggagattgaattctttggaagattaatgtcataaccagagacaaactcaggataaggagttgattatgggagacaaagtaatgtgcttaacatgaagctagatgaccatactgagattttaaagaaatggttgaaaacatagagattgcaggagtgatgttacttttggacaagaattcaaaagttacctggaatgtctgagcttgcacagagagagggtacctggtgcaaagaaaagtgaacctaggaaaaagcctagaagttggtttacatttaaggaatttgagaagaggtagcaccacccaccccccacacaacccccaaccctgccaacttacaatatagaagcatttagacacacactgaataataattttttttttgagacagagtcctgctccattgcccaggctggagtgcagtggtgccatctttgctcactgcaactccgcctcccagattcaagctattctcttgcctcagcctaccgagtagctggcattacaggctcccaccatcatgcccagctaatttttttgtatttttagtagggacggggtttcgtcatgttggccaggctggtctcaaactcttgacttcaggtgatccacccgcctcggcctcccaaagtgctgggattacagacctgagccaccgcgcccagcctaaataatgaatttatagatgctacactgtatggtttcctttttctgctgctgtacaaccattcaagtaacataagtttcatcctggttcttaatgataccatgaataaagtatagaaactctttagctgaggattaaagattgttgtgtttaggtagaccaggtttctgatgcagccctcagtataccagggaaattagccattactgtttgccttgtaggtctaatgaaccctttagctttttattttgtatatgtctaagttactctacaaattcttatggaagtataaagagatagtgaaagacaatcttatgagaaattttaataagaattgaaatacaggctgggcacagtggctcactcctgtaattccagcactttgggaggctgaagcgatggatcacctgaggtcaggagttcgaaaccagcctggctaacatggtgaagccccatctctactaaaaatacaaaaaaattagccaggcatggtggcgggcacctgtaatcccagctactcgggaggctgaggcaggagaattgcttgaacccgggaggcggaggttgcactgagccgagatcacgccattgcactctaacctgggcaacaagagtgaaactccatcgtaaataaataaataaataaataataaaaaagaaatacaacttactttttgtatcaaataaattttggtgcacaaacatcataaatgacataatatctgtcacacatcctttagcaaaacaggattgttaaaattcttacagctaatattatgtggtgaagttcttcctgttgaataattaagtggattaaaatatcatatttcctttctgtcattagaaatatattgtgcattaatcagtccttgggcctgagaacatttatctaggttttcatcatctgaaaactcacagtccaatatttcacctgtattatcaattcaccattatcattagagtttagaatgctgctgtctctttccatctatcttctgttgtatctaataattaggagatatatatatatatatatatatatatagagagagagagagagagagagagagagagagagtgagagagagagagagattggtaataatactaatatatataataatattatatatatacacacatacagagagagagagagagagagagagagagattgattttaagccattaactcatatgattgtgggagctgaaaagtcaaaaatctgtaaaatccaaaagcctggcaggatggagaccaagggaagagttgatgttgcaatcttgagtccaaaggtaatccgatagcagaattccttccttttctggggacttcagtcttttctcttaaggacttcaaaattgattggagaaggcccacccacattgtggagggtaatctgctttactcaaagtctgctgattgaaatgttaatcacatctaaaaaataccttcacagcaacatctagattggtgtttgaccaaacaactgggaaccatagcccagccaagttaacacataaaatttaccatcatcagccatcatcatgaggttcataatgtcatgtgtttcttcacatataaatctcgtggttcttttatttttttagtagtacctagttaataaggtacctggaaatatacgttaaataatagaaatggtctttaatatcttaatgaatttcagagttctatcagagtaattgtaacttgtatataaaaactgatatataaaaaacaagtatgttttttcttcctatacgttgtgttaaattaatactaattacctatcatgaaatgaatgttttccatttttcataaatgtatttcatttttaaattaagaggattaatatcaaaacatatttgaataggatttaaaatccaaattacctgttgcgattatatttaattataaatctttcaagtgagtttataataggaaaaatattttttattaaagtgatgtaccataattatgaacataaatagtgttttctactaattgtttttgtcttcattatgtttctttttaaggggaaagatctgggttaacaaatgttttattcatccaccttgaaaattaaacataataaacaaaactattaaataaataaaccaattaaagaaaatagtttttcttccttttttgtgataaagatgattatgagtaaatatattaaagaattttatactcagacaaagtgagctaataagacaaatacaaacagagatgagcccagaaagagatactctacatgtttataggctagcatttttatcttatgacctacagggtcattgtaactaaagtcttgaatttctgttatattttggtacctgtgggcataaataggaatattactccctgatggcatcatgcattttagataaaactaagccaagggttaaacacgtgccatggactgttcctaaaaaatgctctcagctctcaagttatagaaaattgtagggattattattttgtacctactacttctttctttaccaaaatttacttatacatgatttgaaaattgcttgccacctgtctttattctgttgtacttgtcttaagtaaaacatttataaagtaagtaggaaggattaatagattgtgacctttctacatgaaaaggggaaagccgagcttgttctacttttgtcaggaaagagtttgaatagttacctgttactgtaaaacaatcaccccaaacttagtgtcctaaagtagcaataatcatttattatcactcataggttctgtaggtcaggattcatgcattgcttggttgaggggttctgtctcacgatcactcatgatgttgcactcagatgtcaattaggctgcagtcatatgatggcttgactggggctgaaggattcactttcacagtgagttacttgtatagcttgtgagttggtgctgtctagttggtttccctctaaacgagttcctccatgggactacttgagtgttcttatgatgtggtggctggcttaccccaggacaagcaacctatgagttttgccctgagttttctgaaacatgatcccatgttgctttgaatatccccattagacactcccacaaatgtcaatcatactctttgccctaaaagttgcagactacttgtacatgtcctttatcctacatgtgtacaggaaacacgtgcagaataacatgtgtttttgtttcttgaaagaaacaagaacccaccaaaactttatagctccgggacatgatgataattatctcaggtccactcagcctggctccacatggaaaatatgggtattgtaaagaaagcttttgaattttggaggcctaacaaaaagacctaggaagctaatagttggttatgagataattataacaatggtgatgaaagcaattgcgattattacttttatgttagtgagataaatacataagaatgtccttctttaatttcattccttaatttccttaatccccattcttgatttctggattagaggaaagctatactatctacctgattacacaaaaagactggactgaggggtaaccattaggactcttgttagttgaaggtaataaactatattacttcagtggctaaaacaaacaggagcttttttctcatataaaactagaagtcaggaaacaaatggttgctgatgttggtttatccgtttgacaggttctacctttatcctggagattctttggcctttatttctttagtaatatagtagtaacagcactgaatctaaaataagagcacttggtccaagcactggctctgcccccttagtgacagtgggacccatggcaaattatttaatctctccaacagttaattttctcatctgtaaaactgggatcctgataacttccatactagtttggtgttaggattcaatgaaatgacgcatggaaaagtccttttcaaatggctactcactatacaaatattaatgtcttagtaagctcaggctgctataaaataatgccatagactgggtggcttaaacaacaggcagttgtttttcacggttctggaggttgagaagtacaagatcatggtgctgacagatgtggttcctggtgagaaccttcttcttgctgtatcctcgtatgttggggagagaggtggtgcagagaggtactctagtctctcttcttgctcttcttaaaaggacactaatccaattatggaggcctcaacctatgacctcatctaacccttattatttctcaaaggccccacctccaaatatccattgggggttagcacttcaacatacaaattttagccggcgggggggatgccagcattcagtccataacaatcaactatcctcattattgagagttccactaggccttctcaagggttgacaatgatagtgccctgctagctataagagtaaaaaaattttcacatctagaaaatgggtgcacgaatattggtaactgttctaatgtctatgcacagaatttttagaacttgctcgagaaatttgtctttcctgacagtgttgcttctcttaaattccagtcgagggccttgaaaaaaataggttttccatcaagattctctgaatgaataaatgaaatgctctgatattttctttcaatattaagataaagcaaaatgtatacagaattttctattttcagtgtttccaattactgcatggtttggcttattaccatctctaagtctaaccctgggtcataggagtaaagccattgggggtcccctacaaaggatacaaggcagtggtagatacaataagcctgacaattggagtcagatttttctctttcatacaggaaccatggaactgttgccctgggccacagctggctctcagaaaaacgtagaactggtcgaggaaaggaaaggcagggagtccttgattcacttgttatcagaaaattgtctgttcaaacaacagaatgtttgaaaagataaaatcaagtctcaaatgcacagaataagaatgaggggaaaacacctttctctgtaattaaacagaaaagtgtgccatgaagtgataaaacccagtcaacctgaaaatgtgaacatcaagtgtaattgtgcagaacgataaggtaatatgaacagcacaggaatatataggctcacgttggcattttaaagcaatggcactttacctgttcctcatgaaggatttggtttagtctaatcccttgtaggagccactaagaggagaaggcacagtccttttgggatgtaaaatggggaattctttctatgattacaagaatttgtaaattgctcagagttttaggacagcaggttatgtgtctctcaatgttgggtaccatgccaaacgtactttaagagacatagcaataaatagaatgggattcatttttttcttaatgtctggcagggcaaccaaaatgcccacgtttcccttcagtagcttggtattttggtaactaaaaacatgttccagggaactccagaatatgaaacatttcagacaatttgaaactgtcaaaattttcacttctttatgggacaaataaaatctaactttattcagattttaaagtatctcataaaagagtaatactttagatttgtgctgtgctttatacgaattggatgaggaactcttatacatatataagtggattttattttcacaacagtccctatggtagatattgtccttattaagtaaatgagagaaccaactatcaaagatattaatattttgcataagatcacacagatagcggaaccaggatttaatccaactcctctgattctaaaaataggtgttagatgggtattctttccccaaacctatgctgaaaggaggctacatttggagtcagttattgaaagtttaaatatatgtgtatatatatatatatatgtgtgtgtgtgtgtgtgtgtgtgtgtgtgtattcttatatactcatgcatgtagatagttataaagtacatgcttatatgtcaattttatatatacgactgatatataaactatcaatttgtgatagtttatttcaattaagttcaaacatattgggtatttattgactcatgggacttaaaatttctcagaggcattaatttctatgcctttaagcaaaataatgtttagcccgttttagaaagataaaaggctaacatatgttttgtttttgtttgttttgttttgttttgttttgttttgttgagatggagttttgctcttgttgcccaggctggagtgcaatggtgcgatcttggctcacagcaacctccgcctcctgggttcaagcgattctcctgcctcagccatctgagtagctgggattacagacacgtgccaccatgcccggctaattttgtatttttagtagagacagagtttctccatgttggtcaggctggtctcgagctcccaacctcaggtgatccacccgcctcggcctcccaaagtgctgggattacaggcgtgagccacggctcctggccgctaacacatgtttttaaaaaataaacaccattcgagtaggaaaagtgggagaactggtggttcagctagagatacggagatgggagggcaagttgctttctcatgttgccacatctgtaagttacaaatgccatagattaggaatttcaacgttgttgtgtctctctgaggacattctccatgtagtatatgtttcgcctccctgatggacagtaagcatcaaacggttactcctttatatttgaattattttaattctaacatcttgttctgaaaataacgggaatgccataaatacttactgattgattggactgtctcgcaggggagctggcagctagtgtaggctacaagctgccatcatcatctccatgaccatgagtcatcactggaattaccctaaagaggttaataaaacgccttgtttgaaaagcaaacaaaaagccagaagaaacccaaagcaaacagacccagactttgcaatgggtagtgaattttcagtcttaagggattgagagtccttttagtacaatctctcataaacatataacagattttaaaagcaccttggtctgattccagttcacatacctcatccttgcagaatacaacatactaggccatttgaaatgttcctcagtttacttttggaggatctgctgatttgagcaaaatggaaatgaaatgtatatagaaagctcttaatttttttttttttttttttttgagacggagtttcgctctgtcgcccaggctggagtgcagtggcgggatctcggctcactgcaagctccgcctcccgggttcacgccattctcctgcctcagcctcccgtgtagctgggactacaggcgcgcgccaccatgcccggctaatttttgtatttttagtagagacggggtttcaccgtgttagccaggatggtctcgatctcctgacctcgtgatccgcccgtctcggcctcccaaagtgctgggattacaggcgtgagccaccgcgcccggccagctcttaatcttaagaagttcagtttcgcagctccccccccaccaacccccaatcttgaaagcaggaatttggattagggttttttaataaaactttctttttcttattaccatgatgttttttgagagggtacagagaactcattaaaatgttatgttataacttaagacaaaatgggaatgagaatttgcattatataaacaaagtgtatgactaagtaacctgttacatataaagtgtttgactaagtaacctgttgtccctaggagaagtagaataaatatcaacatgtggcaactaacagaatgtgttgtgatcactaaagcagcacattcattgactttacacttcattaagtaggtaacgaattttacaaattttaggacttaaccaggctgtccataatactttgcatcagtaagtaccaaaatctacgatagggcacttcggagttccttaatttaataatattgataatattttgtttacattttgatttaattgtatcatttcattatttttgtgtcctgattctaaatatatacgtcaacaagctatatggccattcaaaacaggtaaactttaaatatgtttttgacatagaaattatgtaacagtcttcatcatgagtataggagtcagatttccaattgaaaatttcatcctctaaaatacttggcatatgtatacagttgtctagttcagacaaaaaagtattgaatataaagttgattttgtaaaaccagaattggcatccttaaggaatacaaataaagggaatcttaagataatataataatgctgatttgaaatgaaaattaataaaattgttattctattttagtatgctaaattggacagatccttatttcattgaaaaattagattcttcagtatatcagtgcactgtgctaataacacaagaagattaaattatgtccatatgtgatttggtagaatttaattataaatataataaatccttcaatatgtacagcagtgaatattccaaatttatctctcatataagttgtgagcaacttaaggataggcaccatcccttaacatacctagattaagaacagtacctagaaaacagtcatcaaatgcttcctaaataaattttcaccttcaagcttatggcagcaaattaaacatagattgacccttttctaatagagacagaatagatgagactgatgacttttttttataaatgtgtaagtctgcaaatatttagtaaggatctaatttacacaaagaaatcaacctagagtgagattattttattcatttcccggaggctgtgactgaattatatttgcaacttgccctaatttttatacttaataatttgcattagtatttaaattatgtgaaggaaaaatataagtttaaaatactgaaaagtatattcacacattcatcaaatgttgattatgtgcttacagtgtgcaaggtattggggctaggaattatgtggtgttccaaggaaaccatgatacagcctctttcattacagtgtttattattaggtagaaaaagtaaaattagtataatattagataggatatatgtgtcataggagtaatataaacaatattttatgaacaatgtatgaaggtataattttgttcatttatccatttatcgctctgtacatccatccgtttattcattgttcattacttcatttaataatactttagtgaccattggaaaagggatttataaaagtgagtaaaatgttaatcattttctaaagaagttgataatctagggaaagacaaatgtgtaccaacaataacttggatataaagcataaattagaggtacaagcaaagaaaaatgaaagtacaaaggagaaaaatatttggctgcatgagagcagggactgtgtcttgtttcatcatagattttccagaacctagatcagtgtttggcacaaagtaggttcagatgagtttgtgttgactgactgtctactgaagtaattgtggaacatatcatagaagaagtagatcagaggctggatcttaaaactgggagaaatacatttcagctccgtgaaaccccagaagtgatatttgacattagaaagcacaaagtcacactctaacagtgacagtactgagtgaagtaagaattttctgcaccccttcttcttcttccactcccattaacccttgttagggtgagaaatagcagctggtgaatggtagagaagactagcaagacagaaagaggaagcccaccatgcccactaccccaggtagtaaaggacctgtccacttccatcctcttctaattgaggaagaaatcatatatgtgagttcagattgaagtattgattaatatattgagctggatattctaattttaatgtctcgatatggagcaggactttgtttccttaatgatgaccagaaaagacatgaaacttacccatattttcacccaagaacagaacagaacaacctacttgaacagatttaaagggagaaccaaaggcagataaagttgtctttattcttacacagcataagtcctgattattcatcaatttatacattttatgaatttaagaaaaaaggaaaggaagactataaagggattcatatcaggatacacatgaaggtaatgtagtcagttttttagtggaaccaaaatattacagtcatcactgaacgaaaatattacaatcattacatcattcactagattaagtgaataaattaaaaatatattaaataaaattaacaaagacatgagcttttcaaagtgtgtggtaacctggagcaataagcagtgtagttggaatgttacctcttaaggattatcaaagaggctggctgttcagtaggacagtggtatggtaaagcaagcttgctacattgcagaactccagagggcaacattctaattatctttagctatggggtctgttcccataggataactataacttagtaggttgacagagcctcccaagaaaccacagcagtgctcaattgtggcgaattacttctctatcccatcaaaatgtcgtgattggacccacaactgtgcatacatttttttggcattttcctgccagaagcatatttacatttctttaatatccagtcatatccttcccttatttaaaaataattattcagagaattccagttttttgtaatcctctcttctatgaattttagcaacacttatatacagatacttgatattctggagaaatatgcttcaagaccatgtggattaacagattttcaaatgccgttatagtatatgtatatactatatatgtataagtatgtgtagtccccaaaatgcgtactttaaaatcctcataatagatctcttacagatgaggaaaagaagatgtagaaaggttacataaagtagctaacaagtattccaaataatattgaacttcagtctgactattccaaaattgcattcttaactctgatttctatatttgttttccattctaaactgtgtattgtgatataagttcctcactaaggctctttttcagggtcttcctaatactaaagtcactcttacaatgagtattttctttacgtgtgaaatccaataggcaaaaaaaaaaacttggcaataaattttaggcattaacctcatgccaagtaattatcagaaggctgtaatgctttgaaacttcacaagtctgattttaagataatggaatgaggcttgcattgtgaactttcttgatgctttacattgcaatatgctgtatagattgacttcctaaaaataaaaaataaaaaaaaagatttgtagagcatactgggaaggtcttgccaattaaaaaccggagattggctgaaggcttgcagcaattgaattttgaatacagatggtgtcaaatcgagtgtttccatagcaacagactcttccttaataacttttagatgggagggggtacataaaagagaaaaccatcttttagcagatgtatgttttcagcatgttttcagattgattttggaagctaatttgtacttaactagtgattgttttaagtggatctaaatattactaaattctcctgaggaaacattttgagaataacagaaataaactctaggaactttataaagacatgaaaagggcacaattttacaaaacctttttttttttggtctggagccaatcaaacagtattttatattgagtatgacctatcaatagtcaaagagttcttgattcttaatgcctgttaatattgaatgtttagaatatgggtaaaatcaaggaaaaagtgctatgtatctcatggatttggaatatcttaatatactctttcttcaggttaatgattatttttaaaaaatgatgatataaatcatttcaggaaggactgcataaagaggtcattgatagagttcatatcatatagcagagttgtcgtagatttaatgtccaatcctcagttttgcatagccaacaactaaattttagtagtttacctagagatgatcaggctctgggagactgattcatgctacacaaactcacaaggcactggtttataaaccatttgaaagaagaaataataattcaaactattattttacaacaagactggcaggaaaatcaataatggtaatgtgttcggggtgtcctccccagtgaggactatccagaagaccaaatgatagattattgttcaaagtgatagaattgggagaagggtaataaagcattatgaaaggatgcttccttaagtgagaaaagctacataaactacccatctttactattctagatgaccttaaaaatattaatagaaacagagaaacagacaattcatctcagatggtacaaaaaacataatagcacatgtttgctccctggcttccttttagattccctgcaagaggttttcccccaaccaccaccatatacagatatacagctttaccttcactctcctattatctgtcacagaacaatataaaactcagatatgttagtataagttaatagttggtagctttatgttaatgacattgctacctgttacccccagattcatctgggttacttcatccccaaaaccctttcaaaacgacatttcccacaaagatttctagtattactggccattcccggacatcttgcttccaacataagaaattctgacataatagggatataagaaggccttgggaatctgtatttataacaagctccccaggctatctgaggctcagccagtttatttttgcagatagctattactatccacaatctcttttatcctattgtaattgcagaagaaaatctttctttctagtttctttgaaatttctggaatgttaggacttagagcctctaggaacttgtacataaaaagagagacttaaagagatatcaaagtagagatagagatagatacagataagtgcatagacatagaagtagacatatataatagaaacatatatgtatacatagaaatagaaatatgccatttagaactcttaagaaatatgtgcactcttaaaatatagtttaaaaatgtaaagaacttgctattaattgaaaatagcataataaacttaaatgaaataaggaccccaaacgcaaatatttctctctgacacaccacacacacacacacacacacacacacacacagacagagagagagagagagagagagagagctgtacaataacaaccaattcctgacccagataaagaaaaaatttttatttatcttctttctcattctattattattttttctagattaaattaaaatggtaattatgtgtaagaacaagcattattgccatataaacaatgcaacaaaggaatcaattgaaaattaagtgaaaataaaaggtacagcttcgttaaagacccagttcttagagcttagtctcaaactctttgtactctgcactcttttcttgatttgactcgattgattgattgattgattgattgagtcagagtctcactctgtcacccaggctagagtgtagtggctcaatctcggctcactgcaacctccacctcctgtttcgagtgattctcctgcctcagcctcctgagtagctgagactacagacatgtaccaccatgcccagctaatttttgtatttttagtagagatgggacttcaccatgttggtcaggctggtcctgaactcctgaattcaagtgatctgtctgccttgttcccccaaagagctgggattacaggtgtgagccaccacgcccagccgattttactctctttagaactgcaaaagtaggaatctagctcatatgcagacattctagaaagtttgatttcaaaagtcttctcaaaagaaagagagcaagagcaagaaagaaagcagagagagaaagcagaagataaaatggcattgtttgaacagggatggaaactgagtaagaaatttggtcactaaacactttagtgtctatcatttaagattgtaatttggttatttatcactggaaagtgattaataatctaaaatgcattttataatactaatactattaaaacattaatttttggagaaagtttattatagattgatttatacttaccactgaatattaaaatgtttaatggaagtagtttcaaatagtatttaatgatatagggaattattacaacattaatgctcaggaaaaaaagtaggatatggaattatttatgccataggatcctaattttgtaaaaaacagagaaaaccagcaaaagaaattataactggaaggaaatacatcaaagtggtttgcagttatcactcatgaaattgaggtgaacttgatttttttccttttatatccatccgtgttttaataccacagacatgctttagatctgcccgtatattgtggctttcagagggtaataaaccattgtgactcagaaatagctaagaatttttatctctcaagaacaaattttcactcccttggggtgtcattatctgttgagaatgcatgcaatagttcaagagccaaaagactctgattcagtaagtttagggtagaaaaaaattaagtacatttttaaaatagagctctggtgtttcaaaggcaatgtgcaaatatacctacttaatattattctaattttttcaggatagctgaaatataaacatctatttttagtaataacacaaatgatggaatgcttttacatatttataaatcattaaggatttgctttttgtttctactgtctggaacatataaatttgaacacaatttagaacaacattcaggaaatatgatttatttattaccttcttgacctttattttatttttaccatctacttttatgtaagtcttttttttcaatcattgtttatttctttacttttccttccacatagaattaaagggagattcgggcttagtgtccttaattcatagttccattgtggctattaaaaggtgaactgaaagcttgcaaacacgtggtaccttgtagataattttctccagtcagacagttagataaaggcctctgaggtttctggggtcattgttgaagctatgttttaaaatcctatatccttctctcattgttggttccttttcacaacacagaagttttcttttttttaatttcaacttttagatacagaaggtgcatgtgcagatttgtcacgtgggagtattgcatgatgctgaggtttggagtacggatcccatcgccatgttagtgagcatagtaactgataggtcgtttttttaacccactcccctccctcctccctctagtagtccccagggtctattgttcccgtatttatgtccatgtgtgctcagtgcttagctcccacttataagtaagtgagaacatgtgatatttggtagaacttttcatttttaagttaaaaaacaaaacaaaatgaggatgagtggaagaactattcagcacagcaggttataaaccaattaggatgatgacgccctgaatggagattttcatgaacatctcatattagctatttcagctttggtttttttaatgttcaaagtaaatagaataatgaagaggctatttaggaaggtttagactgagggaaaaaaatcctttcattaggttccaaataacggttagcttattaaacagcaagaggcagagatttagcagagaaaaaataaaaagatttaaaaaaaaacaacgagattaaaaggtcagtaataccattggaactggcagcatggcaagtttatatcagctatcttttgttttggaacacaactatgctaattctgttctgaacctcttgctaatgcctgtctcaagaaaatttaacatactttatctgtgtgtacaaaaatacctaaggacaaagctattacccaaactgtattcagattgaaagaatccatatagaaatttgcagctaacgtattagtcagtgtatgtaatttctactgcttcacagcacaactctttctaattttcaggagcaatatagcaactgcttgccagccaagagaaaaccataggagcattcttatcattggagccaacattagttctgcctacagtgactaacatagatgcgtttattgctagctggaattttccattggcactagttacatgtaataagttagtgctttcaaatggaccgtggaatataggaaaactagagtctgacgtaaccaaaaaaaaatgttgataaactcagagattatgaaagagaggagaggagtggtttttgtggaaatgatagaaaagcaaaaaaagatggcaggatttggaaaaaagaaaatcaggttagagatttaattagtaaaggagctccttttaataattatataagagtatgagtttagagtaactgcctggctaatatgtacaatcttcaagttcagtcgttttccaaaattctaacttttagcattttttttttgtaaattttaagtggaaatcttccacttttgttgactaacttggctacctgatattttactcaacctcctactttcttgttctctacttcttctgagtctttgcttccacaatgaggtagctcatattccttaagtttcctgtctggttttgcttttttttttttttttaacagctaaaataaactctacaagcatttctatcattttctttacatccaatctcttgtcagccatgtcctaatcactttggtaaagtatcagtgaccacccaagaggttcactttgcttcgtcaaaggaccacctgtcatgctttatctccagagcttctgccttgaaagtaagaataatataacctttcctgaatgtcttatttcaatttcatgcatttgatctgcctcttcagaccattcccaaggctttgcccttgttctttaccctcatggcttcagttattcatcactatatgaatgacagctctcaaactgacagctctggcctctcacctatttcatctattccatatggcaaactgtctatattacatttcatcatgagggataattataattccacattcaacaagaaattgtgggtccgtgttgatttccaacagcaacctttattttttagactatgatagagaaagggtcaactttctctcttacttatttatctcaaataactcaaagtcaagctagaaaagccaagcaagtaatatttcccaacaaagcagctttaagcaaaatgattttcagacacgacatgcagcctgtattgtggaagaagcacagtgacctaggtgtactttgctgaaaagcagtggtcacagtccattagtttcatctttttcctgcaagagagaaaagtatggcagggccaagactcctaagaccccttaaaaaattgtgaggtttttataaccctgttcatttcccatcaaaagcattcatgaagcacctgccatgtaccagatgatgcattctaggcagagggaagaacttgggcaaagtcctgtacattttatcttctaaatcttactaatcttttcttatctttccatctaccacccaccatcaggctgtgcctggactcctatgctaacatcttactctgtttttctgcatcttttttgccctcccctccaatctactctccaattagcaacatgactaatgttttcaagcccagattagacggtgtcacttccctgctttaaacctttcagtggattcccattgcactgaggttgaagaccaaaatctttaccataactcacaaggccactgggagctatgaaaattttcttttttagtttttccttttaattagtgatgcattcaataagtggagtctatcgtgaaagcatagattccaaaggcatgtgaatactcaattatgtaatttacttacagaatgtttattacttcttttttagctttgattttgtatacatcctaactcaatctcagttatataagagattataaaaaagtttgtgatgaatgcatacataaaggaacaaataattaacaaatatataaagacaaatcagtattgaatgaccaaatggctctttatttattaaagaacttagaaaaatatagtcttgcttgagaccaagttctggcaacgtatgtgtgtctttttgtttgggttaaaaagcattagttttatatgttttaaaaggataggatcttcccttggctgcaaatagtataggcaaaatgctattctgtatcttattttaaagaaaataacaatcataccttattatttgctgacagttttgcagtttacaaagcactgttcacatggattaccttattttaaattcctcaattttttttccttttactatgggaattctgtttcaggagaatttccctttaaaattaaggtgattatactattctgttcctgtatttcgtagccatatgtttcaccaaggtattgtctctctccaggtctttcttctctggatgtatagttatgattttccaggaggtaaatgaaaacagtgggagcaattgacagagtgttttttgtttcccataaacccaagcattgcatttaaggagctgctgtactattgtaagagttcctatactaattttaaaagttcatttacatattttgtagatttttaggataagtcatcagaaaaaaattaaaaataaatttacatattttgtattaagctgttttgttacttgaatggggattattggaacgaggaaagaattacttttatctccccatttttcaaatcatttactataacattcatgaattgctgaagtttaaacaatcaaaaatatctgaaaatggagcctaggaagggtaacttatgtctttcatactccttcctttttggtttttctaccagcattttagtctaaaatatattttattttcactgatcctgtgtttgtcttaataatatagtatgtatgttaaatgaaccagaattcattgatctttttttttattattcctctttttgcttttctggagaagcatttgaagaaatcagttcaggctacacttcatcaattcatttcctcatcttccccttaatacaaaagccccattttcactcttcaaaacatttgatcacatacttaattttcatagcattgactaaatgtatgtgtttattttgtttatatattgcatatttgtgatgattttcacttttacagtttaggcatgggtaggaaggacacttacatgagtacttaagttcttggttatgacttgagaaactcacaaggtagcatggaatggcacgtaaacaaggctttgatagggtgaaagggaattatcaggacaaaactgactagtggcagtgacttttgagcagagtgctgcaaactgaaaaggcagagagcattgtaggcagagagaaagcatagacacatgtgagatacatgtgaaatacttagacaaatgtgaggtgtgtggtaacattgtacatacctagggctccttcctgtgtagctgtaaagctggagtataggcatcacaacaggcagcagaagccaagaaactagaaaagtagacaaaggccacgttataaaagatcttgtaggataggtaaagagttttaatactatcctgaaagcagtgtggggtgggaggcatgacattaaggaaatttaataagtgatgaaagaccaagattttcatcttcagaagacttctctggaggtgggtggaccacttgatgtcaggagttcaagaccagcctggtcaacttgatgaaaccccatctctactaaaaatacaaaaaaatagctgggcatggtggtgcatgcctgtaatcccagctactcaggaggctgaggcaggagaatagcttgaacccaagaggcagaggtggcagtgagccaagatggtgccactgcacttcagcctggatgacagagggagactccctattaaaaaaaaaaaaaaaaaagacttctctgactagagttttaaagaaggatggggagtgcaaaaggctaacattaaatcagtggttctcatccctggctgcacgttagaatcactagggggagtttaaaaaaaatgccaatacttggactccaccccaaaccagttaaatcagagccttaatagggcccagacattcgtagtttttaaagcagccctcttgattcaaatgcacagacaaggttgtgttccgctgaactagagagaccatcaggaggcttttaactaaagcaatctagggaagagagagatgaatgatatagaggccagaagagctattaaggagaagtgactcggcatcttcttggttaaagtataaggaagaaagaagaatgaaggataatttgcatgtttctccttcagtgactaagtagaggaacagatgtgtatcagtgattaggggagaggaagaatgaagatgatgtaatccagtttggatatgttggctatttcatagagatttagtaggcgtttggctctatggatacagagttcaagagacaattcttagcttaaaacacagattttactctgattattttagagatagtaaatgaagcaatatacatacatgaactcaccagagagaatatgtaaagtgaaaacaaaaagatcaaagggagacccctagggaatagcaacatttaaggaatgggcctaagagagtgaggagtggccaaataggcagaataaaatccaagaaggaatcttccatattaatcaaaagagaaggtttcaaagagggttcgtcaattggcaggtactgaagggatatctgaaaacataaagactttagactctctaatactgtagcaactttaaggtcactgctatcacctacaaaagtaatttcagtggcaaaagccaaaacgtaatggtttagaagggtatgtgaggtgtggatgtggaaatagtgggtatagactattgcttctcaaaatgtaatcacctgaaaaatcttattttaaaatgcagattttgattcattagctctagagtggagcctgagattctgcatttctaacaagttatcaggtgatgctgatgctgctcatacacaaaccatcctttaagtagcactggtgtaagccactctcccacaaaggaggaagacatagggtttccatcaggggacgcaggtggggtgtaggaccaaaggaaataatactcttttgtcttttgtttggttggttttggttgttttcttcttaaaataaacatggttgtagacggagattgaagacataggaggggtaaaagatggaatcacttctcatagaagatggaagagactggaacattgagtacagcgagggaattaggcatgggtaggagggacacctaaatctgaagagaaggaggtaaggaagaattgaaatacagaaaagttctgtcagtaagcaatgtatggaattgtgctttttagccatagtttctgttcaagaaattgttttccatttatttttatttcttaacttgaatagttggatggtggagtatgcttgtaaaaataagagtgaggccactttgtttttcggggttaatttccgttttctgcactcatcaagtaaaagttgaagtggcaaggtgtagatatgaaattcagtgtgtgctaagggagaaaaaaatgctttttattctacatgattttaaaaatatttatattccaacaaatgcatcaaatttgatgtgcaaatttacagtgatgaatgagttttattgtgtgcattgcatgctggtgacatggtaataaatctgtggtgctagaattataatggtcccctttagcttcgctttaatgaactcttgctgaacacttttgagttgttagtactttatttgctacatttggcacttaattagttaatgactgagatgctggaccgatggatcatctaatgatatgttaggcctattatcacatctagatagtttcttttctgtgacttgtaagtgacctaagatgataaactgaaatatttttgcatagatatacatcaagcttttctcctaacttcaggctttcatcttaagcaatagtttccaacacccccaaaagagaagtcattatgtttttaaaaaaattattcattttaatgtgatcaaataatatcacatttcagcattcacctatttaattaataaaacaacttacatgtttcattatgactggatgttgatattttttcataatctattatcctccaaccagtggtaaaaacccaatcctcctctcacccagctcatctttccgtatgggaagcaatacatacttccctatgttttattaccaaaacaggagaatgagctttctttagaaggttaactcattttctctattagaatattcagcatacttttaaggaggtaatctggtctttgacagtctgttgattagaaaattaagagacctgcctaaattccatttccaactcctctccatacacattgtgactttgagcaaaacgttttgccatttccactcgtataagttctgtttagtatctttaaacttccatatcccacagatggtatttttttcttcattggaaagtggtgttagtgattcagaaaactgcttaaataatacactgctttgtgttttctgtgagagaatttttttttttttttgagacagagtctcactatgttgcctaggctggagtgcagtggcgcaatctcggctcactgcaacctctgccgcccgggttcaagcgattctcctgcctcagcctcccgagtagctgggattacaggtgcctgccactgcgcctggctaatttttgtatttttagtacagacagggtttcaccatcttggccaggttgatcttaagctcctgatctcatgatccgttcacctcggcctcccaaagtgctgggattacaggtgtgagccaccgtgcccagccgagagaacattttatctaacattctattttaaaatttttcaaatacacagaaagctgaaagaattgtacagtgagtgctcatgaacccactctctagattttgttgtatcactttacttctttctctacccgccaacccctattattttctgatgcccttcaaagtaagttggtgacatcggttccctttacccctaagttcttcaacatgcatgtcattaaccagagctcaatatttgttcacatttcttttgtttgtttgtttgtggcaaaatttgtatagactagaatgtgtaaatctcatgtgtattatgaaatgagttttgatgaatgggtatacctgtgtgacacatgcctctcttaagatacaaaaaaatagccttggcccagacaggagggaacattttttaggttggcttgagtttcctttaactgacatgtagcatgactgaatatatgaccataagattgccaagttgaaatttaccaaaggtccatccaggggaacagtatggctattgatacgtcatttgttcatctaggcactgggctgggtgagttcttcacaaaaaccttgtaaggtgagctttcagctctgacagaggcatcaagaaacgtatttcacaaactgttagagctgaaaacatctccagggatcatccaatctatcctcctttgctttatgactcaggatttaagaagccccagaaaagtccaacagtgttaccaaagtacacgattgcctatttacgcccctataattgagagctgtctaggggtcaggtacttttctcagtgccttgtgtacattatttccttttatctttctagattattaattttcttgttattatccccatataatagaggagtaaacagtgtgaaaatagcactaaactgttgatcttttccatgttccaaactaaccttaaatgttaggctaatattataaaattttaaaatttagtcatttgttctgggtctggcttccatgaacttaaccaaaatgcttggctgtttctgcattctagctttttgggatttagagaaaaagcaacttggtcatcatagtggccaggatttatttatgtgccaataactcccctctgtttttagctttttgatctgttacatctcagatactttattctctatttgtaaaacaaccacattcctccttttctatatctaagtgaaaaaaaatgcccgttcatactagctacatggttagcatatatgtttcttcctctttgtgggtttgagttgaaacttcttttgcaaagcttaactatagataggtcttccacagaaccctgtttaaatgccttgtggaagtagaagggacatatcttaatattccttataatctgtgttattatttggactttcctcagttccttatatgtctttgtatgtcaaacattgagttatgcttacattactctaggtatagttgtgtcctagctttgtacaaggttacaataatggtggtttccttgttttcagcttcattcttgatcatgcctaacattttttgatggttttagcctcggagaacagtctactgctatttctccctttttcctgatcccaacaaatagtttagaaatctttgtcttaactgcaattgggatcatttttcctttagagttgcccacagttagtcatgtccgtcactcttcactcactcaaatgacctcaaaagatttacctgcaatttaagcctttcaccttggcattttctacctggaactctggcgtactctgtgggatcagtgagatccatagtgtgcactccctagcagatcgtgaatgtttgttgataactataattcattgtttagtcttgtctatacagagaagcagtagcaccttgctttagtaggatcctttatgcttttattcattattgaattttatcttcacaataattctgtggttctgcagttgtcattatttcagtttgggagttgaggaaactgagatcgtggcaaatcaacttttcccatttaaatccactatttcatcgctaatccagggttataacccaagactaactgctagtcaaagttgctttctaaaaatcagttacacagacttctaattctcgtgctgtacagtcagtgcagaaattgcaacagaactgttctttgttctgtagcaatgtgtattcaaaaggtaatcatttcttgtgtataaataacattcctccctaagagagatgttgtgggaatttatatcagtcaagaatgtatatcgataattaaacatagctagtctaaaaaacttgaagtgaaagattggttcgtattcaatcaactgaactgtttctttctctgcaatattgtggttcttgacatgattgctgagtttccaatttgacacttctggaggttcgtaaatcaggacacatgctgggtctcagtctgtcatcctgagtcttagcattggttatttatttccctttattacccaacatctatttactgcacaaattagtcgagaagctttccatgacggacctttgtgagaaaaaaaaaatgtgtacattgggtagctcttcaattacaaacatgcacagattgtctgggtttatgtgcatatactttattattatttcacttttgtatgtcagatgaatttggtgtaaatgtaaatctaacaatatgggctctagtggccaaatacattgccataatatgtttttgatctgtcagtctcctgggtgaagtgtcgcaagtgtggtaaaattctgtagtataaattgatgctcagttatggacaattaccaggtctatatgatgtcagactaccacactgatccacttttaggataacagcttcgctctgatgatcttcagattttagatttgctttcattccttgacaaaatgaaatacatttaaaacttctaaaattgtcttttgtatatatttctgcagggtctactcttgggactactataacaatcaattgtactgctttgtttcttttattaaatagcagaatagctgcttgattcgtctgtatgtgctgatgtgtgtctgtgaatctagtccagttcactgtccaataagaatttctgaaatgttctttgtcacatcaatgtacagtcaaaatcgtattgtgtttgtagcagaatgattgcatcttttattattcacagcagccaaaatgacacatatttcacacgtgacaccttttttaaaaaagatgaattgtccaaagttgtatgtagaatatatttcacaaatcaaattccctatttaataaatggtgctgggagaactggctagccatatgcagaagagtgaatttctataaatagaatgcaactgtgtaaatagcatccaaatcaagaaacataatataatatagccagaagctcaggatcccccttcatgtcttctccagtcatgaacatttcacaagggtgactactatccttacttcaaaagttttctattactttttcctgtttttgtgtattatatgaaggaatcgaacagtcatatctacttgtctgtggctgtatttttccccccaacaatatgtttgtgagattcatccatattattgtatgtagttgtggattgttcacttttcttactgaataatattctattgataccacagtgtatttacacatgttgatatagatgagaaattgagtagtttccaacatgaggaaattgctgtcaacaattctgcaatccatagccatgctatcaacagtctagtacatggtttttggtgaatatattaataactatgcatttctgttggatatacacctgggagtggaattacaactcaaataatattcattttaaaaattttatttcgtttttagtcgacaactatattatggggtacattgtgatgtttcaatccatatatatacattgtggaataatcaaatcaggctaatagcatatctatcacctcaaatacttctcatttttgtggtgagaatatttaaaatcctcctttttagctatttggaaatatacaatatgacaatattagctatagttcctgtgctgtgcaaaagaacaccagaacttattcctcctgtctaactggaactttgtacccattgataaacgtctctcatttttccatccacccaccactgcagcttttgatcaccaccataatactctccatttctatgagttcaactttttttaaactgcacatacaaatgagattatatgatatgtgtctctctgtgccaagtttatttcacttaacctaatgtcctccaggctcatccttattattccaaatgacagaatttcctaggtttttaaaattttttttttatttttaattttttggggtacatagtaggtatatatatttacggggtacatgaggtgttttgatataggcatgtaatgtgaaacaagcacatcatggagaatgaggcatccatcctgtcaagcatttatcctttgtgctacaaacaatgtaattgtacttttagttattttttaatgtacaattaaattattattgactatagtccccctgttgcactatcaaatactaggtcttactcattctttctaactattttttgtagccgctaacaatccccacctatcccctacctccacactaccctttgtagcctctggtaaccatccttttattctgtctccatgagttcaatagttttaatttttagatcccacaaataagtgagaacatgcagtgattttcgttctgtgactggcttatttcatttaatgtaatgacctccagttccatccaagatgttgcaaatgacaggatataattcttttttattgctaaatagtaccgcatcatttatatgagccacattttctgtatccattcgcatgttgatggacagttagcttgcttccaaatcttgcctgttgtgaacagtgctacaacaatgtgagagtgcagatagctcttcaatacactccctccttttcttttgagtatgtacccagaagtgggatttctggaacatatggtcattctctttttattattttgagaaacattcatactgtctttatggaggccgttactaattcacaatactaccaatagtggataaggtttccttattctctgtatcctcatgaacacttgttatctttcaactttttgataatagccaatccaaaagatatgaggtgatatctcattgtgattttaatttgcattttttgatgattagagatgttgagtattatacatatatgtgtgtgtatatatatatatatatatatatatatatatatgctgtttgtcatcttttgagaatgtctattcatatatttgcccatttttttattagggttatttgttttcttgttattgagtagcttgagttccttgtatattttggatattagcaccttatctaatgtatgatttgcaaatatcttctcccaatctgtgggttgtctctttattccattaattgtttcctttgctgtgcaaagctttttagtttgatgcaatcttacttacctatttttgtgttgattgtgtttgggggtcatatgcaagaaaccactgcccagaccaatgtcatggagctcttctcttatgtttttgtagtttttagtttcaggtattacatttaaggctttaatccattttgagttgattcttgtataaggggtgagataagggtccagttttattctgtatgtgaacattcagttttcccaataccatttattgaagagactgtcctctccctattgtgtgttcttgctacctttgtcaaaaatcaattgatcaaaggtgtgtaggtttattttagtcctctttgtcttattccattggtctgtttttatgtacttgccatgctgttttgattattatagctttgtaatacattttgaaatccagtagtgacatacttccaattttattctttttagtaaagacagctttggctatccagggtcttttgtggttccatgcaaattttaggattttttaaaaaaaattctataaagaacaatatgcagattttgttagtattgtgtcgaatctttagattgctttatgtttaacaatattaatttttccaatttatgaacacagaaatctttccatttatttgtgtcatcttcaatttctttcgtcagtgtcttatagtttcaacacgcagatctttcactttcttggttaaattcactccaaatattttttcatgctattataagtgagattgtttccttaatttctattttagacagtttgttgttattgtacaaacaataacaattgttatcgctactgatttttgtaagttgattttgtaccctgcaactttactaaacttgtgtatgaattctaacagttttcagtggagtccttaggatttgctgtataagattatgtcatcagcaagaaggggcaattttacttcatccttttcagtttggttgccttttatttctttctcctgcctaattgctctggctaggactcccagtactaagttaaacaagggtggggagagtgggcatctttgtcttgctcctgatcttagagaaaagccttctacgttttactgttgtgcatgatgttagctgtgggcttgtaatttatggcttttattcttttggagaacatttcttctatacctaatttgctaagagtttttctcataaaaggatgttgaattttgtcaaatgctctttctgagtttattaaaatgatcatacggtttttgtacttcattctgttatatgttgaatcacatttattaatttgcatatattgaaacaaccttctatcccagggataaatccctcttggtcatggtgaataatccttctaataaactattaaatatggttcactagtatttcattgagaatttttgcatctaatttcattcgtgatattggcctatagttttctttccttgtagtgtctttgcctggctttgggatcagggtattgctggccttgtaaaataaatttggacgaatcccttcctctttagttttccaaaagagtttgagaaagatttgtgttaggtcttctttaaatgtttgtagaattctcccatgaagccatctggtcttgagctttcctttgatgtgagaacttttaaatactgatgcaatctccttaactctttccttagctgttactggtcttttcagatttccaattttcattattcagttttggtagattatgtatttctaagaattcatccatttctgttaggatgtccaatttcttggtatataattgttcatcgtagtctcttaggatcctttgtatttctgtgttatcagtcataatgtcttctctttgatttctgatttgatttatttgagcctgctctcttcattcttagtctagctaaggatttgtcaattgtgtttagcttttcaaaaaaccaacttttagttttattgactttttttctattgtttctctagtctctatttcatttatttctgctctgatctttgttattttcttctttctgctaactttgggcttaattcattcttctttttgtagtttcctgaggtataatgttaggtatttcatttgagatatttcttcttttttgatgtaggaatttattgatataaacttccctcttagcactgcttttgctacccccagaagtttttctatgttgtgttttcatttctgtttgtctcaagacttttaaaaaatttcctcttgaatttcttcttttgacccaataattgtttaggagcatattgtttagtttccacatatttcttaattttatatgatttctcatgtaattgatttctaattttatattgtggtcagaaaagatacacgatgggttttcttaaatttgttgagacttgtctgtggcctaacatatgatctatcctggagaatgttacatgtgtacttgagaagaatctgtattttcctactgttcagggcacaatgttctgtatatgtctgttaggtccatttggtctaaaatgtcattcaagtccaatgttttcttatgaatttttctgtctattgcttaaagtggaatattgaaattgcctgctattattatgttataggctatgtttcccttcagatcccttaatgtttgctttatatatttaggtgctctgatttgggatgcttatatacttgttatgtcctcttgatgaaataacctttatcaatatataatgatgttctttgtcactttgaacagatttgacctaaagattattttgtctgaagtaagtgtaactaccctgctctctttttgttctcatgtacatggagtatcttttttcatccctttactttcagtctatgcatgtcctttaaggtgaaatgagccacttgtaggcagcacatatttgggtcttgttttttgttgttgtcgttaatccactcaaccactctatgccttttgattggagagtttaatctatttacattcaaaataatgatggatgggtaaggacttactagtgtcattttgttcattgtttcctggttgtcttacagattctttgttcctttcttcctctattgctgtcttcctttgtgttttgatggttttgtgtagtagtatactttgggtcttttgtttttatcattcatgtatgtattataagtttgtgctttgtggatactccgaggcttacataaaacattttataagctgataataacttaaatttgattgtgtgcatatactcaacactttgactctccctcctcccacattttatgtttctaacatcacaacttacttttttttttaattatactttaagttctagggtacatgtgcacaacttgcaggtttgttacatatctatacatgtgccgtgttggtatgctccacccattaacttgtcatttacattaggtatatctcccaatgctatccctcccccgtcccctcaccccacgacaggccccggtgtgtgatgttccccttcctgcgtccaggtgttctcattgttcaattcccacctatgagtgagaacatgcggtgtttggttttctgtccttgtgatagtttgctgagaaagatgatttccagcttcatccatgtccctacaaaggatgtgaactcatccttttttatggttgcatagtattccatggtgtatatgtgccacattttcttaatccagtctatcattgatggacatttggattggttccaggtctttgctattgtgaatagtgcagcaataaacatacctgtgcatgtatctttacagcagcaggatttataatcctttgggtatatacccagtaatgggatagctgggtcaaatggtatttctagttctagatccctgaggaatcgccacactgacttccacaatggttgaactagtttacagtctcactaacagtgtaaagtgttcctatttctccacatcctctccagcacctgttgtttcctgactttttaatgattgccattctaactggtgtgagatggtatctcattgtggttttgatttgcgtttctctgatggccagtgatgatgagcattttttcatgtgtcttttggctgcataaatgtcttcttttgagaagtgtctgttcatatccttcgcccactttttgatggggttgtttgttttttcttgtaagtttgtttgagttctttgtagattctggatattagccctttgtcagatgagtagattgcaaaaattttctcccattctgtaggctgcctgttcactctgatggtagtttcttttgctgtgcagaagctctttagtttcattagatcccatttgtccgttttggcttttgttgccattgcttttggtgttttagacatgaagtccttgcccatgcctacgtcctgaatggtattgcctaggttttcttctagggtttttatggttttaggtctaacattaagtcttcaatccatcttgaattaatttttgtatatggtataaggaagggatccagtttcagctctctacatatggctagccagttttcccagcaccatttattaaatagggaatcctttccccatttcttgtttttgtcaggtttgtcaaagatcagatggttgtagatgtgtggtattatttctgagagctctgttctgttccattggtgtatatctctgttttggtaccagtaccatgctgttttggttaccgtagccttgtagtatagtttgaagtcaggtagcgtgatgcctccagctttgttcttttggctcaggattgtcttggcaatgtgggctcttttttggttccatatgaactttaaagtagttttttccaattctgtgaagaaagtcattggtagcttgatggggatggcattgaatctataaatttccttgggcagtatggccattttcacgatattgattcttcctatccatgagcatggaatgttcttccatttgtttgtgtcctcttttatttccttgagcagtggtttgtagttctccttgaagaggtccttcacatcccttgtaagttgtatttgtaggtattttattctctttgaagcaattgtgaatgagagttcactcatgatttggctctctgtttgtctgttattggtgtataagaatgcttgtgatttttgcacattgattttatatcctgagactttgctgaagttgcttatcagcttaaggagattttgggctgagacgatggggttttctaaatatacaatcatgtcgtctgcaaacagggacaatttgacttcctcttttcctaattgaataccctttatttctttttcctgcctgatcgccctggccagaacttccaacactatgttgaataggagtggtgagagagggcatccctgtcttgtgccagttttcaaagggaatgcttccagttttgcccattcagtatgatattggctgtgggtttgtcataaatagctcttactattttgagatacgtcccatcaatacctaatttatcgagagtttttagcatgaagggctgttgaatttggtcaagggccttttctgcatctattgagataaccatgtggtttttgtcgttggttctgtttatatgctggattacatttattgatttgcgtatgttgaaccagccttgcatcccagggatgaagcccacttgatcatggtggataagctttttgatgtgctgctggattcggtttgccagtattttattgaggatttttgcatcgatgttcatcagggatatttgtctaaaattctctttttttgttgtgtctctgccaggctttggtatcaggatgatgctggcctcataaaatgagttagggaggattccctctttttctattgattggaatagttttagaaggaatgataccagttcctctttgcacctctggtagaattcggctgtgaatccgtctggtcctggactttttttggtttgtaggctattaattattgcctcaatttcagagcctgttattggtctattcagggattcaacttcttcctggtttagtcttgggaaggtgtatgtgtgcaggaatttatccatttcttctagattttctagtttatttgcgtagaggtgtttatagtattctctgatggtagtttgtatttctgtggtgtcggtggtgatatcccctttatcattttttattgcatctatttgattcttctctcttttcttctttattagtcttactagcggtctatcaattctgttgatcttttcaaaaaactggctcctggattcattgatttttttgaagggttttttgtgtctggatcttgtaggtatgcttcattgtttcttattatttttttcttttgtcttctctggctgtgtattttcaaataggctgtctgcctacaagatccagaaaatagcctcaaaagggtcaatctaagagttattggccttaaacaggaggtagagaaagagatagggatagaaagttgatacaaagggacaatatcagagaacttcagaaacagagaaagataccaacattcaagtacgacaaagttatagaacaccaagcagaattatctcagagactacctcaaggcatgcaataatcaaactcccacaggtcaaggataaagaaagaatcctaaaagcagcaagagaaaggaaacaaataacatgcagtggagcttcaatacatctggcagcagatttttcggtggaaatcttaggccccgggcatatccagagatgctgtctgagggccagtcattggagtcaaaaaccttagcagtttacctcatgttctattctattgtggctaagctagcactcacaccacaatataaagtgctccctgctcttccttgcccttttaaaaggcagaggatcctctccctgtggccctcaccaccatgagggttctgcttggcctccactggtgttcacttaaagcccaagggctcttccatcagcttgtggtgaatgctgagagaactgggacccatattttagggccttgggctcccctctggcccaaggcaggaccaaaaatgctgtccaagaacctaggccaggactcagaaatcccagaagcctgcctgcttctctgcctttctgtggctgagctggtacctaaggggcaagacaaagtcccctttacttttctgtctacttttctcaaacagaaggggtctttcaccataaccaccacagctgggaatttgctgggtgacctatgaagccagcacatctcagaggccaagtcccacagtgtactccctgggtattgcaactggttattcaacgttcaaggcctctttagttagtagctgatgaatcctgataggactgagtccttccctttaaggtagcagattcccttttggcccagggtgtgtctagaaatgctatccaggaactagggcctggaatgggggcctcatgactctgcccatgccccatcctactgtggctgagctggtatccaagatgcaagacaaagtcttctttacttttcgctctcttctccttaacgagaagtaaggagtcacttctgttgctgcaagcttcactgctgggagtaggggaggtatggtgcaaccactcccttagccatgccagctggtgtctccctaggtcatgtgggagaccctaatccactggcttcaatatatagagggacgtttctaaattatttatctgtaatttgattaagaagatagacacaggcaataggatatgccaacagattctctctaacctatagttattttaagaaagttagggaaagagaggtcattgattagttttggcttactgaattatttgaccctcccatatcttttaatttatggattttatataaggcacagatattctactagtaaacatgacattaaagatgttttatacaaatgaatgtggttgatacaaaggcattaaataagaaacaaaggaaattcagaggacatttgttcgcctggaatagagatcattagcataagcataagaggaaaataaggaaggaaatgggaaagtcttgagtccattttcaaattatgaaaacttgaaatgcaacaaacaaatagtggttacttaagaagaaagactgaagatgctgggcaaaggttaactttagaaatggcatttttatatcattataaagagaaagtggggataatggaaataatctacatgtacaactcatttgacagacatttattgaaggtattccaaatgccaaacactagtttgtgcactaaggatgtttttaatttttactttttactttatttttattttctagcttcttccgctttgccagagaaggatttttttaaatggataaaatactaacttaggctagcttctttcagaaacagacctttaaacaatgattaatggtgaaagtggtttggttgtaatgtgatcccaggaagtaccagtaggagagtgggacaatgagataataaatgaaagaagccaataattaagccagttatggaactagttattgctttgggccactggggtttgatcctgatgaaggagctctgggagatagtaaacaaacaaacaaacaaaaaacatgcctcaaagttgtcaaccacaagggggtaaaggcaaggaaccagggctaactattccaactcttatccatcattggctaaatgcttcctggtacataaactttccagcacttctggccagcgcacctagcaagctgaggaaaatctctcaggtttgcagtagggcaaatgcttgtactaggacactgctggcatatacttgaaggatgagtgccaacggcagatagatgggccctgacagcatcttctacagattctgtccttgcctttgaggcaaggacactgtctagagtcagagacagaaatgtaaaatgtaaaaatgtaaatcatagtagcacacagtacaagttttaaaatcttaacaaagtgttatgggagaaccacggtgagagaaaatgactgcacatatgagagcaggggaagtctttatatgtgatgatgacatttgagtgggtgttccgttatcaaagatctacttaaaagggaaaaagagtagaattattttaaaccatggatgtaaccaggcgtggccaccctatatgtgaatgtcctgggataattttgtccccagatgtctctctttttgagtgtcattttcatttatgtattcataatataaagaaattgaatagaaagaggtaaacattggtggcaaaaatcccttcctacccataaggctcacagaataatgttgtctaaatgccataacatttttggtaagttttggttctatgggctttggaaattttttatgtaggaactcctccaaggtgatataagcattcagtgtatttatctagataccctagttaaagctactttaagcaggatcaaagtcctcttttaaacttttgtatttgaaagctattcccatgtacaattcccatgattcttgtacaattcctaggagacctttgtttacatcaaaagagtttgtctctctctataagttagaacttgtacattgtagtaatggaaaatccatttcaaagtagcttagacttactcagacaaaatgtattgatcagtgtcattaaacagttgaaagatagacgaggcttgattcaggaattaaatagcatgaccagattctagttttccttctccattgcatggctctgctccccagtatttgttccgtttaattcctcttaattgttctaagatggatatcaggatactgcagaactacgtgctttctcatccatcttaaacaagaagcaatgggttttctcttttagaatcacgaacaacaacaacaacaacaaaaatcctagagttgtttcattggttctgattgaccttacttggaaccataagtccatctttgaattaaccactaaagccagggagatgagttaaaactaagtacacaccatccacagagcaaagagaggtctattgtgggaaaactgcacaaatggaaaaataacaggggaaacacaggagaaggaggtagttagttaatgttcaatacacgcaccttctcagggacttttcttccatctggcatcatctttgtcttttgaccattttccccaatcaatacctatattcatactcaagttttccatatttgggaaaaaacttctcttgacaccaaactcccctctgacttccttcttataatgatctatggttggatagtctacaatttactgtccttactttttcataggtattttttaatctcctacagtaagatttctaccactgcactgaaatcattttgtgtatggtcttcagggaattccatgtggccaaagccaatggatacttttggcatgggctttggaggtctaacttcttgaatccaagtgtcggctctaacaatcactatctatgtgaccttagaccagttatttaacgctgtctttatttcctcatttgttaaatgaggataattgcagcaatagaaaaagaacgtaaacaattatacttataggattgtatgatgattaagtgattaatgcaaggaaagaacaacacagagcttcagacagtgtagatattcaaataaatgttagttatgatttttattatgtcttgtgacatctatgagatttgaaagtgttaatcactcttgtgtttttgaaaatctttcttttccatgttctataaaagtacactttcttgatattcctcctccttctctagtctttcattcatcttatttgctctttgtgttttatttattctttttacgttgtattttccaggagtccattcccagcccggtgttgggctcagtctatgtgccatataaatgagaatgcacttgcatttgaggctttgctttttatttctctgtagtgacggccaatcccagatttctgtctctcccaaaatacacagctatgctatagatccttcagtcctcctgactaaaatgttagttttatgtgtgtgttcctcacaacctcccagtgaataggtccaaaactgaactcattatcttctccatgctcactctgcattctttggataggcagtgaatagcaccactatctaacaggcacctaaaccagaagccaggtaatctgtcttaaacccttttgttttccaagttcttatcataatggctggtgtctaacagatggtaaataaaatagagactagctggctacatggatggatgtgtggggatgcacagagggatagatggattattgagtgagtctctagcctataaatatttttaattaactaataaattatgataatgtacagttgaaggtcaagggtgaaaaagcataccctcagtgggatgcacaccccaaggagccattttaacttgctacataacacacatatgaccacttttttgctgaaagccttctattattgagcaagcattcaaatcccatgtttgcctgaaataatggttcaggttataaaagtttccttctttttccaggattaaaattatcttcctacataataggaagaactgctttatcttttcctaatatctagagatggccttttaaaaatatagactgttttccctattgaaatgaactgtaggatgtacaaaatatttactggcatgaatcaaaagagcttgctatgtttatgtgaaaaccactaggcattctaaaaaatattgctagcatagtaaaatgttagtaattaagactaacgaaagcgaaggcaaattggaatcagagactatttttaaggaatgtcaactgtattattttcaaatacacatggtacataacagtaggatatgagaaaaagtcccaagtatgtgtactaaagtagcctgctatgataagttgaaaaagggtttgtaattggaatatccacagaatatttcagaacacttaaagacattttcatttacactttatacagctttcttataagagcatttacaccatttattttataaaccaaagattaattagaagactaaacaattacaaggcctcaactacgaaagctgttccactacctagtggaacaacaacaatgagacacacaaaacaatggcgttcaaagattagagagagacttacggttaaacagaggttgacatgttaactgaagttgcaatataatatgtcgactagttttgcaatacatagcaaacacccaaacagaaataaacctgataaaaaaacagtagtctataatgtgtgccacttactgagttttaattattctggggactatatttttgatttcatgttacaatcactagttttgtggggtctttctagtcctgatgcttatttacaaaatatctgaagtatttctttctatgtatttatttttgagatggagttttgctctgtcacccaggctggagtgcagcggcatgatctcggctcactgcaacctctgcctcccgggttcaagtgattctcctgcctcagcctcctgagtagctgggattacaggcgtgtgctaatttttgtatttttagtagagactgggtttcagcatgtcggtcaggctggtctcgaactcctgacctcatgatccacccgctttggcctcccagagacctgggattacaggcgtgagccaccgcacctggccatctcaagtatttctttaacttataacttcacataactttgtggaggcaacagggttaattaaaaaggactttacttacataacaaaataagaagcatagttttatattcctgtgccatatacattttgtttgtccatctgtagccattctttgaccttctctcccttgctctttattctgggaggctgacctctgtcatcattgggctcccatgccctttggcttccagttggtttaggcacccaagagccctagaaggaaattgaagacaggaggtaaagtgaggtcaagatatttattctcctaattccctccctttgaggttgccacaggctgactatgtcctttgacaaaaggttattgctcttctcagggtggtttctcattccaattctctgcttttggccacttttccctcccctcatcccttgggcctagatgtagtaacagctctactgttgcaaggttcttgtattatctgtgatggtttcttataccctgcttatcttgtgatttgttgctttgtagataaacctctcagattatctaggcaagatcatagaagaacacgtatgtccagctaagatattccagaagacagtagggaaacattgaagggttttataagagggagtgcagtgatcagatttatgttagttttaatctttaattggggtagaatttacattctaaaacagagatttgggtctgggaggatgatatagagcctcttatggatgtgagggcaaaaaatgatagaggtttgcagtgccaatagaaagaggaaagaagttatatatgagagaaatttgtaactaattatatgaggtgttgggtgacgcttaggaaagaatctagaatgtctatcaggtttcatgcttaagggataaagtagatggcagttttattacttgttttctgtattatttttatttcataaaaccagcttagagaagttgcatagaaaaaataatgtagtcctgtttattttaatatttgaaaagaacatatttcagagtagaatctatatagtacctccctcttggacttccaatgataccagtgatagcctcaatataagccagtcttacaaaatgcacccagcgtgaattcttaggtattgttaaaagaagttggccaggcgcggtggctcacgcctgtaatcccagcactttgggaggccgaggcaggtggatcacctgaggtcaggagtttgagaccagcccggccaacatggtgaaaccctgtctctattaaaaatacaaaaaaaaaaaattagctgggcatgatggcacgtgcctgtagttcctgctactcgggaggctgagacaggaggatagcttgaacccgggaggcggaggttgcagtgagcggagattgcaccattgcactccagcctgggttacaagagcaaaactccatcaaaaaaaaaaaagaaagaaaaagaagaagtttctaatacacttatcttcccttgggttcactcagaagacccttggaaaaggttttaagagcaagtgatttatttggggggtaaattaatcagtagaagagtggaaaaatgagacaggtgaggcaaggcagccagtaaagagtggtgcattatcaagccagctgctgttgtgggtcactggagctttatcccttgggaaactctggaacccttgtaaaatacatgcctcagagttatttcccctagcatcaagggagctagtgtaacaatatcccaattcctacaattagtcattatatacaggctgcctctgggagctggaggggaggcatcagttgcctggtatgtctagcctgtcacatggatggcaaagcaaactcctgtggcaacagaaagccttcaggcaatgaaatgctggcactgggaaatcaggctgatgggtgctgaagtggcaaggatgaggggatatggatattctgctgtagtgcttttctaacagatgattcatatttggttctagggatcaagaattgagttaaaattttatatatatgttgatgttctatgtcaccttcaggaaaataatttaacagaaactaatatttgccatcaaaaaagcaaagaatcctgttgttcatcatcctagccataacacaatgaataattttttaaataagcaacataaatgtgagataacgtttggaagttacatttaaaatgtctcctccagactagcatttactactatatatttatttttccttttattctagttgaaagaattcagaatcagtgggatgaagtacaagaacaccttcagaaccggaggcaacagttgaatgaaatgttaaaggattcaacacaatggctggaagctaaggaagaagctgagcaggtcttaggacaggccagagccaagcttgagtcatggaaggagggtccctatacagtagatgcaatccaaaagaaaatcacagaaaccaaggttagtatcaaagatacctttttaaaataaaatactggttacatttgataaaattataccatagattgtaatttaatgatgtttaatgtaaagttattaacagaaaatcacgttaaagctgaaatgaacagtagactttgtatatttattttcttagagacagagtctcactgtcacccaggctaaagtgcagtggcacaatcatagctcactgagccttgaactctggggctcaagcagtcctcctgcctcagcctccctagtagctgggactactagccaggcgtgtaccaccacgcctggctaattttttaaaaatttttgttttctgtagagatgggttcttgaactcttggcctcaagcaattctccttccttggcctcccaaagcactaggattacaggcatgagttagcatgcctagccagtagacttttgagtcaaggtagagaatagaggaaaattgacagctaatgtcaatgttaaagttaattttgtttagtaatctggatatagttggctggttttctgttgcaccatctttaagatcacttcaaaattggtatacgtatttatgtagttgcatgaagtcaaccattcgggcttaattccttcctagaaaaagtaacaggtctactctttcatatcttatttggaggccctggatcaagaaatgggggtgagtgggtatcaggattggggaggaataaggagtactctcactttctccccccattctcttacctccagcccagctcattcttctcttctttctctttcctctgaaatttcctcaaatatctgtctgcttagtagtctataattcctcaggataaaagaaaaaggaaaaggaagaaaattgcttaataactatgttttatcaagcagcatgcatagtgctttgcatgcgtttaatcccttcaaacttagtatttactagtcagtttgaaaagcccttaaatgttaaacaatggttaagctttagggtattttgagcagggaagtaacatggtaggaggttgatcagattgggcacttgatcaaaaccctctatagatattttatctgacagaaaaggccttttgctaaaccagtatctgattctcaaattggttatgtcatctaagaaggaaaccgtatcattttcttggatgaaatggcttccatttccaaattagtcaggttaggctatgctaagctatagtaagaaatgaactctgaaatctcaatagcttaacacaataaagactgctttcttggttatatcatagtccagtagaggttgacaagccattcttaggagctgtcccccaacatggtcacttggaaacccagacttttccaattttgtgacacttgtcattttcaacacactgccaaaagccactgcagaaaaggaagacagaatgtggtcagtcaatccatggtgttttatggccaggcctggaaattatgtatatcacttccaccacatcccatcacacagaacttgttctcgattgaatttcaggaagagttaatggaattagtgagcttttagccaatctctgtcatagccattttatcgaagggacctgagctgctatgaggacaaggttttagtttatatgatgaggatgttagaaagccacatagaattttacagtcttatcattagctctgttggagtcaaaatctaggtgaataaaaattctttcaagagacacatgttaccactaatggttttttcaatggatgagcatagatgaattaggaatctccaatggtcattttcctaattcctggtctgactatgtaatatatagaatcatgtggttattcttgaaagctctagtcatattcgtgaggtagtcagcatgttatgctacttctttttcttctctataagtttcggatactatgaatctattggatcacaaaccaaagtagttaactggtaagaaggtataagcagaaaatacgaagtttggactggatccttgagttagatgagaagaaggagagatgagaggcatacagtgatagatttgactagggcaagaggactctggtagttagcaaatgagaaataaatttaacctaagaaaatcctaaagtgatggtaagaatggttagggtttaattgctcttagaagagcaagtagctttaaataagagacaaaaatatctgcagaaggaaatatgaaagtagaaaacaaaacaattgcattgtcaaaacatgtaagatgttttaatcacctaaaataaaaccagaattgtattataattgctatcctttgtcaaacttttgaaattaaaaaaaaaaaacgctttggaatggtctaaaactacatcataaaaatggctcagccactatctatagagattgacattttttgtttgtgctctgtgtttaggaatttaatgatgtgtattgctgcagattcaatgtaagttcccgatacagataaagatggccaaagctgtaattttttcatccatttcttgaatgatgtatgctaaaattaaagtaatcctaatgttaataataacttttagtgaatgcttgctgtgtgtcaaaaagtatgctagtcactttatatatattggtttatttcatcctttcaaaaacactctttgaaaagtactcttattattcttagtttgcagagaagaaaactgaaggctagagaagttcagaatcttcttttgaaagtagtagagttgtgatgcgaatgcatagcaattactcttgtagatgacctcacaggcttcctcttccaattgtctacgtggctaaaacaaagcaagaaaaccccataagaatctgaaaaagactcatgtaattattaattgacaaataagattatattacattactgataaaccaacaggtagaaaatgaaagcaatgaaatagtatactgcgaaaaaaaatttcatattatattctttgatgaaaaaataaaacaataattgcaaactgcatttcatttttaatgaaacgacaatgtttaattcttctaaaaggtagggagcaaataaaatggttatctggtctttacatcgaatgtgtcatcactactaagtgatattagctggcttattacttaaaattttcttttaggaaaaaagtgtgaaaatagacaggaggagacattaaatggctaaagcaacacccccttgctccgtaagttctttctgagtctgtgtgcctaagattaacaagagagcctgtgagcctcacaaggcaatcacaaagctatgtctacagccttggagagctgtgattacagcagccagcctcctttgcagcacctcagtgatgactacactaactctcactactgagcaacaatgaaatgtttcaaacccaaccaccaacactgttataactcttaaaatttgagccagtcaccatacctgaacgtaaaaagaaaattaccaaaaatgcttgataccaaaaagcaattaatgattcataattgctaatctttattgacagtctcttctagttcttatctacatatattttaattgtctacataatgtaaattaaattttaaattctgatttgtaaacttaatattgcataaatatttatcaatgttgttaaacatcttttaataattattttaacttctttatattatttcattaatttccatctttatgtccttgctggtctgacatttagaaaaaactcctccttttatttagaaaaaaagaatggtgaggccgggcgcggtggctcatacctgtaatcccagcactttgggaggccgaggcaggcagatcacgagatcaggagtttgagaccggcctgaccaacatggtgaaaccctgtctctactaaaaatacaaaaactagcctggcgtggtgctgcatgcctgtagtcccagctacttgggaggctgaggcaggggaatcgcttgaacccgggaggcggaggttgcagtgagccaagatcacgccactgcactccagcctgggtgacagagcaagactctgtctcaaaaatacataaataaggagaataaatggggacaataacaacctattcacagaacagaaataaaaccggagatgtcatgtggaaaaagcttatcttgaaagcgtggtcagagtggaaagaaacagcaacaggagagtcttgatttggtgaaaaaacagaatgcagatggcatagagtatcaacaattaattagcaggccatcaagagacggccataacatattggtaattgttttctttcacccttaattttttctaaaacaaaaacatgaagttagaaagtagttaattttgttagccacatggcttcatggtttaattttatcttctctatgggcctggtacaacaataaagttcttttgagatagaaagacagatgttaggcaaaaacatacaagattttcattctaatcaaaatctttgccaataggctatgacagaatcctatgagagatgatgccatttagaactttcacaagaggcaaaaatagtatgccattggcacctaaaactgccaacagtgatcatcataggatttatttcatttggcggattcttggttgagttcataacctgttccctaggcttttaagattggtccaaacttggcaatggattctttggaaaaattatttcttgatcgttttaaactttcttttccagtgtcaagagagattttcccaggctccgagttttcatttattttttcccctgtcagtttttgaaagagaaatcccctttttgtcggctttgtgattgcttttgtgtcaaattcagcgtaaaagcttttcaaacgtgacagcattagctgttttgtgcttggctgagctaagagtacatgaattcaatagagaagtgaaatcttgtttgagcctggctgatttggctatataatattgaaaactatctgaagcaagaaattcaatacttttcaaattattgaataaacatttctaaggctgcaaaatctctgtgtttttgaaggcattctttaggaaacttgaaacacagacattctataatcacataattaattttaaaagttgaacttattgtatgtagtaactaaggcagctatttgagtgtctcaaattattttactaaaaagggagacatttttcaaatatggaagtagtgccttacatttttagttatctgtggaaggatcgatggcatcatatatctcatccaccataaaaatatgtacggtagtggaaactgaatttttcttttatatattttgtgtattttttggagttgtacaaaattaaatcagcaaattgacccacactagtagtttgaggtttgggtttctggtacaataatgaaaagcattattagaaatcttcttgccaggacctaccatttcttcatgtattttctttattcccttttgttctcccctaaagcttctatgtgattaaagagaaaagatcaataacccaatagtacttttccttctaaagtatgcatgaaactcttaaagttctcaaagcatacaaacagagtgctctctacattgctgatagaacacaggtagtaatgggctagtttccccaggtaactattatattatataaatatttaatgcagagtcaccaagccttgaataactttatgctttgattgtaccatattttctctagtttgcttttcacaatttaacttatcccgtgcttgaaaatataatgtggtaactgtgtaaatctgctcctcaaaaaattttcgaaatcatcttttcttttttcttttctttctttttttcctttttttgagatggagtctcactctgtcacccaggctggagtgcagtggcatgatcttggcttagtgcaacctccacctcctgtgatcaagtgagtctctcagcatcccaagtagatggaactacaggcacattccaccacgcccaactatttctcgtgtttttagtagagacagggtttcactatgttggccaggctggtctcaaactcctgacctcgagtgttccgcccacttcagcctcccaaagtgctgggatacaggcgtgagccaacatgcctggccccacatcgccttttctgaaccctgggaattaaccaaaggctggcaacaatttttgaaatgctgactctcaataaaaatggcaaagtttgaggttttttaagttggcctttcccgtcactttctcccagctccacagtagccttgaaaatcagtagccttgcaaccataatagctgtgaaaactagcagccttttagccaccagagagtgtagaccaggattggaattcttcaaaaaggccaattttattccaagaaccttgccactgtttgacctatcttgcagctccctggaataaacctatatacatggccttgcctttatttggcccgacttagagataactttctaggaaaagccctagctccagggtgttggtccaaaccaattagcagcaattctttaacataacaggttcctaaggctgtgatgctagttgagataaacataggtctggagaaaaacttccagtgaagctctggagaatgaggtgtccataggggattttggcaacctctgacatgttcttgcgggatctagaagcccatgtgcttgtcttaacaaatagagagtatcaataaagagatagaaattgtaaataagaactcagtggaatatctggagttggaaagcacaataactaaaattaaattttcacttgacgtcagattcaagctgcaaaagaaagaatcagcaaacttgaaaataggtaaatgggataatccaatccaaagaaaagaaagaaaaaatattaaggaaatacagaaagcaaaaactgactgaactgaaagaagaattaggtaattcaacaaaaatagttggagacttcaacatctcacttttaataacaggtaaaagaactaggcaaattaacaaggaaatagacacttgaaaaagactataaagactataaacttacaagacctaacagatatctatacagcgtttcatccaataatagcagaatactcattcttttcaactgtacacgaaatattctctagggtaggccatatgctaggtcataaaataagtctcactacattcaaagggattaaaatcatacaatgcagattttatgaccataatggagtacaattaaaaatcagtaacagatgtaaatttgggagttcataaatatgagaaaattatacaacacactcttaaatagccaatgggacaaagaagaaataagaaaatacaaaaatatcttgagataaatggaaataaaaatacaatataccaaaacttatgggaggaggctgaagcagtgcttagagtaaaatgtataactataaatacctatatttaaaaaggaaaaagatctgaaatcagtagcctaagcttctaccttaagaaactagaaaaagaagagaaaagtaaatctacagtaagcagcaggaagtaataacaattagtgtgaaaaaaatcagatagaggaagaaaatataatagaaaaaatcaacaaaaccaaaatctagaaatttagttatttgaaaaggtcaacaaaattgacaaagttttagctgattggttaggaaagaaatggtcaaattactaatattagagaaaaagagggtgcattactaccaacattacagaaataaaaagaagtaaaagaggatattatgaacaactaaacaaatagataacctggatagacctataacaagaaattgaattggtattaaaaacttctcccaatgaaaggctcaggcccagaagtcttcccccgatgaattctaccaaacatataaacaactcttccaaaaaatagaagagaaaggaacacttcctaaccagacaaagatatcacaagaaaacaagctacagagcaatatgccttatgaatatagacttgaaacgcctcaaaaaattatcaaacctaatacaacaacatattaacatgattgctaccataaccaggtaagatttatcacaggaatgtaaggttggtttaacatccaaaatttaatcaatgtattataccatatcaatagaataaaggacaaaaatcgtatggtcatcacaataaatatagaaaattcatgtgacaaagtacaaaaccctttcaagcttgaaaaataaagaacacttaacaaatgaagaatagaaggtattggccaggtgtggtggctcacgcctgtaatcccagcactttgggaggccgaggcagttggatcacgaggtcaggagattgagaccatcctggctaacacggtaaaaccccgtctctgctaaaaatacaaaaaattagctgggcacggtggcgggcgcctgtagtcccagctactcaggaggctgaggcaggagaatggcgcgaaccctggaggcagagtttgcagtgagccgagacagcagcactgcagtccggcctgggcgaaagagcgagactccgtctaaaaaaaaaaaaaaaaagaaggttttgtggattgaatagtgtcccccgctcccaaaagacatactaaaagcctgagcccaggtatctgcaaatgtgaccttatgtagaaatagagtctttgcagatgcagtcaagttaagatggtatttttataagaagaggaaaagaggcatacacagagagaagaatgccacataaaggcactgaccacgggaaaaacaccatgtgatgttacagttagagattaaagtgctacagttgcaagacaagtaaaactaatgattaacggccatcattagaagcaaggaagaggcaaggaaaaattctcccctacaggtttcagcaggagtatgggcctgctggaatcttgattttggatctagcctccagaagtctgagacaatgagttttgtctacccagctacgcaaattgtgacacttaattacagaagcccgaggaaacgaatacagaagaggatttcctcaacctgataaaaggcagctacaaaaattccacagctaatgttattgtgaaacactgaatgctttcccctaagatcaggaaatagtgaaggatgcctggtctcaccacttctattcagtattgtactggaagttcaggccagggaaattaggcaagaaaaataaataaaagacatccagattagaaaggaataagtaaaattatctctacttgcagacaacatgaccttgtaattagaaaattttgaagaatctatgaaaaaatattagaaataataaaataattcagcaaatttgtaggatacaagatcaatatacaaaatgaattattttatacattaaaaatgaataatctaaaagtgaaattaagaaaatatttacaatggcatcaaaaaatgttaaaaacttaggaataaaagagatgcaaggcttgtatactgaagaatacaaagcagtgttgaaagaaattaaagataaaaaaatagaaaaatatcacatgttctcagatcaaaagacttaatattattaagatatcaatatccccccaattgatctacagactctatggaatcattatcaaaatcacaactggcttttttttttttttcagaaattgacaagtggatcctaccatttctattgaaatgcaagggatgtagaatagtcaaaacaaccttgaaaaaagaacaacattggaggagttaactttccaatttcaaaaactactacaaagctacaattattaagtcaatgtggtactagaatgtgaatagacatatagatcaatgaaatagaattgaaagttcaaaagtaaacctttgcatttatggtcaactgatttttgacaagggtaccaagagaattcaatggaaaaagaatagtctttcacaacctggtgctagaataactggatatacacatgaaaaataatgaaatttggccccacctcacaccatacacaaaaattagcttaaatgtatcataaaagaaaacaaataatctgattaaaatgggcaaaacacttaaacatttctcaaaagaagatgtacaaatagctaacgggtttgtgaaaaatgctcaacatcactaatcattggggaaatgcatattacaatcgcagtgagatgtcaccttacacctgttagaatggctgttataaaaagagaagaatgataacaagtgttgatcaaggatatggaaaaaaggtaacacttgtatatcattggtgggaatgtatattagtacaaccattatggagaacagtatggtagctcctcaaaaaactgaaaacagaattaccataggatccagcaatcccacttccgggtatatatccaaaagaatttaaaccagtatgtcaaagagatatcttcactcctgtgtttattgcagcattagtcacaaaagccatgatatggaatcaacctaagtttccatcagtggatgaatggataaagaaaatgtggtacatatacacaatggagtattattcagccttaaataaagaatatccttttgtttatgacagcgtggatgaacctggaggacattatactaaatgaaataagccaggcacagaaagtcaaatactgcgtgatctcacttatgtgtggaatctaaaaaagtcaaactcattgaagtagagagtagaatggtggttaccagaggctgtggatttaggggtggaaaatggggagatgttgatcaaaaggggttaaaaactttagtcaggaggaataagtttttgagactttatgacacaacctggtgaccatagttaataatattatattgtatatttcaaaattgctaaaataacagattttaaatgttcttgctataaaatatgataaatatatgcagtgatagatacgttaaattgctcgatataatcattccacagtgtatacatatatcagaacatacatgtaccccataaatgtatataattatttgtcaaagcaaaataaaattaaaaataaaatgttttaaaacttttgtaaaataaactttataataataatatatttttaatgaatcatagagctaaatatattaataagaactaaaactttaaaactcttctaagaaaatgtaggaatacaatggattatgcagtgttttcttagatatgacaccaaaagcaaaagtaaccgaaaaatacacaatttggactttaacaaaattaaaacttttgtactgcaagcaatattgtaaagaaagggaaaagacaatcctcagaatgggtaaaaatatttgtaaatcatatatttgataagatacttgtatcaagaatatataaaaactcataattcaacaacaaaaaggataaatgacttaattacaagtgaagaaacagtttgaataggcatttctccaaagtagatgtatagatctccataagcacatgaaaagatggttaacatcattgattgtttaaaaaatgcaaatgaaaaccacaaggagatagtactttttacccactaggatggctaatacaaaaaatacagacaataacaagtgttgagaagatgaagaatgcttggaattttcacattactggtggaaatgtaaaatggtgaaacaactttgaaaacagtttggaagttcctggaaatatttttttaatttttaatttttgtgggtacacagtaggtatatatatttatgggatacaggaaatattttgatataggcatacaatgtgtaacagtcacattggggtacctggcctatccctcacctcaagcaattatcttttctgttacaaacgacaatctaataataatcagttatttttaaattcacaataaattttttgactgtagtcatcctcttgtgctatcaaatactagatcttattcattctatcaaactatatttttgtattataaatttcactacccattagccatccccccctttccccctaccactacccttcccagtctcctggaaatattaaacatgaagctaccatatgacaaaaccattctactcccaggtgtatgctgaacagaaataaaaatacatatgtacacagaaaacctttatacagatgttcatagcagcattatttataatagccaaaaagtagaaccaacccaaatgtccatcagctaatgaataaattttaaaatgtcctctacatccaaaaatggaatattatttagcaataaaaagaaatgaaatactgatatgcactgtaacatgagtgaacctcaaaaatatgctaagtgatggaatccagtcacaaaagaccccaaattgtatcaatacattcatataaaacatccagtaaagactgaaggaggaggagaatagacaatagaaagggactgttaattggtatgggtttcattgggggcaaataaaatgttctcaaattagatcataataatggttgcacaaccctgaatacattaagaaccagaaaattatgcactttaagtgggagaattttatggtatgttaaaaagtatatctgcatgtcattgactacagatcttttcttattttttcaagttttatgaacacagttttagaaacatagtctccatttttctctttcatgaagctgcttgccagctatagaaatgaaaaaatagccatgtctgtggaacataactgctacctagatgggagcctccatcacacaatggatagggagctattttcttttatggtcaagataggcaggttctgtcctatagaatatattctgagatgttacctgtagttcagaaaaacagggatattgttgttctaaacatttcctcaacatttatgtggcttcctatttattaataagagaacctgttctttatgtgtcattatactagtttattctagccctggtcctggtccaggactgtctggaggtattagaattgccctactctatgtgaaataaggtcatatctgaataggtatgtcagtcagcataggctaagctacagtaataagcaacctcaaatctagaggcttaatagtctatattttactcatgttacatgttcgttgtagactgatgagagcattctacttagcttagtcactcggggaccatggctgatggtatctccatcttggtacattctttcatgatcatagaggcaaggaacatggttcttgagccttctgcctggaagtgaccagtagacaaaaccagtcacatggccattcctgagttcaatgggaatgccgatgtataatcttctggcgtgaaaaggcactggatatttgagaacaataatgcagtctaccacaatatgctcatggggtctgaaaaggagctgaaaaaacgccattttctggggttctgtcctctggcattgtttctggaatcgtttccacccatccatttctacaccctctcaactgacttttctcagatgcctggggtagctgggtgatttgttaattacagtattgcttaagccttttaataaagtcagcaaattaaagagagagcccagataaagagaatgctttcaaaaatgtcataatgaaattaaggtaacgaagcacttggagacctctcctcccttctttttgtatgaaacttattccaaagcagctggaagagaaatggggcctgaaagtaaagaggggaaaaatatattgtatgccattagtttaattataaaaattcattacatgaagccatgtaagacagaaaataatggaactctaatgggttggccgataacacatttactagtctgctctcagcttgtagtcattgttgaaaggacagaaaagtaacgacgttggtatgtagtcttcaaagctattgtaaagattaatcattttcagtaagccggaaaatgagggccattttcttaaatagtatgccctgtatagagtgttaccttctgaaacagagttgtttggtaatgtcagaggtttaatagatgagtcttgaagttaatggtgagaggctttacttttgaaatggctttcttacagctattttaacatttctattataaatccataaagaggttttataggtcgttttaattcacacaaggagggaagaaattgtgcttctcttttcccaataaggatttatagaacattaattcattcttgggaccaaattgtttagtgattttcaaaaataaactatgtatttttctgctgtctttttttcagaaatgccttactttattatacataataattttccagtcatgctataatcatcaagattgttttatattcttcaaagctcagttaaaataaacccagtccttttccttaaatttctttatatggatgcataacttctttaactgaattgaaatgaaacctgaattgagagtccagaaacctgcatttttatgatgactctttcactgactagctatgtcaccttgaacaagtcacttaacctttcagagcatttatattctcatgtggacaattatggaattgctcaaaaaggaagaagatatcaaaagatgaaagtgaatatgtaggtaggggtcatatattcgagggccttgtaatccaaagagagaggttaggactttgtcttgcaggtaatagcaaaccattgaaaggttttacacagaggagaaatgaggttctatttgcattacaaaaagatcatttacgcagttgtatgtaggtggaagggtggtttgagagtggagggagggagccaataaaaaagattattttagtacctgagcaagagatgatagggacgtaaattaaggtagtgtcaatggaagtagaagatttggataaaagttaaaaaaaaaaaaaaaaaaacttatgatacaactacccagggagtatgttccctgcctcctgctccagttgaggaccaacatatcagattgatccagagacagaattttggagaacattaatatttaaaggacaggcaaaaaaaaaaaaaaaaaagcttgaacactcagagaatacagaggcgaccaaaagagtggaagccaagaaagcagagaacttcgagaagagaatagtcagcagcaccagttgctgcaaataaatcaagtaaataagaacttaaatctttccataggcattggcttttggtaactgaatcagttaactattttcacaaatgtgagtggcatatagcaataagcccatattgcctttcatgaattttcagcttgggtggggtggcacttcttcatgttgcaggttgattggggtcgctctgctccatatgtcactcattctcctcctgagatgagtaggctagtccagagcatgtttgtcttaaggtaatggtgaagtgcaaaagggatagccacactgcataaatacatttcaagcctctgcttgtgttacttctagtaatatcccactgggattaggcaaagcaaggcgcatgaccaagctcaatgtcaagggcatgctgtctttcgtaggaagaatttcagagttacttagcaaagggcatggatacagggagaggtaaagaattggggccagtaattcaatttgccatagtgacttctgtcagaatagttttagtggaacgatgatggcagaagcctgattttcatgaattggagagtggcacgaatgtagtcaagttgagataatgagtgaatatctgccttctaaagagtgtgactgtgaaaggaaagaaaatgatagagtgcagattattgttgttgttgttgtttaaagatgagagagacactcatgtttgaagtctctagagaaggtccccgcagagaggcaagaagttggaacacacaaagagagagggagtatgtggaggaggatcccagaatagatgggtgcccagatggtgaaatcaacttccaatagcagaaaagtcgcctcttcctctgagactagagagaaggatgcaagatgtaaagtctgatatttcatgaaatgtatgtttgatatattaaatttccccctgtggaattgtaggtaggatcatttactgtgagatttctttcagttcgtgttgtcaggaattagtctgtaaaccacattcgatatttcaaacagaggaaattcaatacagaggactggctcctccataggaatgaaggagctgacaaacccaacagaggacagtgaggcaacccagagtttagcaacttcaggaaactattaccacctcaagggctggggaaccgacaagttttaccaaagcccagaaaccagaaccatcgggtgctaattcacccaatgtaaggtctgcacagcaggtaatggaattacagagggagcagccgtccagtgggaaacggagacaaaggagatactgccaagacagagagagaagggggataattatcttgtttcaccctttctcatgctcttctgtctcccactagtgtgtctcatgacttaacctagttagaagccagctagcaagaaatcccaggaaattctgacctcctatgggagttagtacatctcaatactgagtggagtaggaaatgggtagagaatggatctaagagcaaacgacctcttggtggttagctaacagagttaaatttttccatgaatcccttggttcatgaatgtaaatacaggatccaaggaaaaataacaaatccaacatgtagaactttttgttcataagcatattaggatcctgttttacaattttccgagcaattgcttgattttgacacttcaggacaagccggaggcatggtcagagcaagtaaccccatcctagtttacagatgacaaaactgggacttacaaggttaatgacttccttaagatcaaactgcagaacaatggacaagcaaaacttcctgggaagatgtcctttcgttactctgcactgcctttcttgaagttcctttgagacacagtcattaaaaatttaagtaatagttcacccggaacaaacatttattttacttgtaggtgaatatcacaaaacacattttaaaaggaaatttaaccaatattcaaccttaaaattttaatgatagagctatgcacttgcttttatcttccaagttaaagggagaattttagagttgcagcatttctagacaatgtccataaaacagcgagctacttgctttgcattcagaaggggctcacactgtggggaatatagtttgactcattaaaattagtagtagatgtgctagcagtagtaatgatgatgatgatgctgatgctgatgatgattaatatttatttaatccttcgggcacgccaggcacctttgtaaatgttctccctgaattctctaagttaacccacctaatcatatttccacataaatactgttaatattcccatttagcaaaggaggaaactgaggcacagaaaagataattaactctcccatttgccactaagcgatcacgccaggattcaaacccagcaggctcattgtattgctcaggcttttagctactctttctcttcctcctctcttttctaccatgtagggtcaatatcactaaaataagttcttacacataaaagaaatgagagaagacaaacaattaaagtagaaaaaaatactcaaaattcttgaaattaattcaggttgtctcatagtccacaatcactttttctacctaagatactgtgaatatatatcaagcacatagtgcagtagcagcataatgggtttgaatgtgaaacatttctttcctggttggggaaacaatcttttggggatttagcattttatattcttcatagaaaacacacacacatacacacacacacacatacacacacacacatatacaaaggcaatctttttttataagctagtgctcacagtattttaaatttcttcacacaccatgatcaccacacaagcaattccctgtggtgtacaccattgtcaatggaattcagaaagagaaaagggtgtgtgtgaagtctgttgtatttttgaatttacactccttctgaggtctggagttatcccagtagtaaatttcacagcagtaggcaaagctggtcaaggtcatggttcctagtgtgaatgacacttgggtaaaacccaaggtgggcgggcagaatattaccgtaggagaaagggaaaacattctgtgtggggaatgtctttaagaagggagaaaaaaaaaaaaggctacctttgagaacctttgtgtttatataagggcctgagccccctcaatgtcagtcaaggtcagtgggagttttactttttaatcctacatcctcacaaaacctgggcagtattcagtgagggttagcactcagtcaagatttccttaggtataacagtcctaactttcgctgtgaatacaattttgcagaaaaatatatggcacgcgtatttctacctttcaagcattaaagtacatcaaaaagttctggtttgacgtcaagcctcactctttactaccttgtttagtaggaaatctgtcatttaactctagcttactatttctttcagagattttggaaaattctaggatatgttataatttataattttaggcatttttatgatctattgattatgtttttagattcattggcaccttctgcattttatgttttttaattttaacagctttattgaagtgtaattgatatacaaaaactgcataaaattatatgggctagaacatgtgcatatacccatgaaaccatccaaatggtataacctcttatatctagacttttcaaacaggaacctatgagtgatgggtggcttccaaggttatttaacttgcttgagtaaaataaatgattttaattatatatttactaaaaattttgtttttattttgtattcctgagcttttacatatatgctctgatactggtccatcataagtattttattaacaattcagtgttttataaaaggaattcatttgaaaaaaaggtaaccaagttattggtctcagttttgtggatgttcatgctattaattagcaatttaatagatgagagataataagctcttcttttaaaatgcaaatagcaccctctggatactaagggccaattacatgttctttcgtatcttggaatacatttcttttatcactttaggtttggcttaagtgaggaggagaaagaaagaagtggtaattttgtaccctaggatatttctagaaaaggcaagcctttggcagaagttccctcagaagggctttcaaatagtgcgaggatctgaaaagtggagaatagaaactgtaatgcttgataaaaggagtatggaagaaaaggcaggcattccacgcggataaatgttaattgttttgtaatagcagcaactatgctctgtgcctttagacactgtcctctgctttcatagcaaaagtcagtgatattggcattagcttcttgataatagtttggtaatctgggtctatttgctatatgcagtaaatactattacttggtttgattctaggatgttttagttaactgagaaattacattatatatagattgtatatgttcaataggagttcaccaaacacgctgaaattatgctaagaacactgtttgatttttattctgtaaatatcatactaacgcaaaagaacaaatattaaaacaaaaatgatttttctcctcagaagcattattttcaatttcttccatttcgtgttcagctcatgattatgtattcttagagataaacacagtgtagttaaaaattgtgttctgttttttacacaagaaaattgtgctctttttacagtgattactgtgcacatttgctacatattggaccattggaatgatgtattatgttcttttaatgtccctgcattaaacatcgacattgtttctctttttttttttttttttttttttttttttccgagatggagtctcactctgtcgcccaggctggagtgcagtggcgtgatcttggctcactgcaacttccatctcctgggttcaagcaattctctgcctcagcctcccgagtagctgggattacaggagcctaccagcacacccggctaatttttatatttttagtagagacggtgtttcaccatcttggccagactggtcttgaactcctgacctcgtgatccacccgccttggcctccctaagtgctgggattacaggcatgagccaccgcacccggcctgtttctcatttttttactgctttggttaatgaagattttaagtcatatagtatattgatcttcttttgaagattttatcaggataaagtaccaaaagtgagattattgagtcaatgggaataagcatttgtatgtcacttggtatctattgccaaattgtcctaatagataacggtccccagcagtaatacgtgaatgtgctagttttactggtcttttcagctttggattttattttttgttaatttaattggtgtccaattgtaccttttcaatttaatactctattttttattacttgaaagttaacttttttctttttaaataaaatcatcccactctttctcttgtttgaactacctgttcctattcctgtgtccatttatcaatgacttaacccatcctattgaatttgatataactatcttaacaattagtattatcttaatgcttagaagcctcctctctgcacttgcagaaatgtttaatagaaatttcaggttgatatgcttcgagataaaacctaccattaattgacttctttctttgaaatatgtttcaagtgatgagatagcaagtttgaaaacactgaattgccaaagacaaacaacgaagaaaatgtaggtgatttggtttagtaagattcttatattttgactttttttctaattttaaagtaaggtattctaaaagtattttgatccttcaaaaaattcgtgactagaataacagtactattcttttgttgttcaatattttctgtatgcaggtttagttgaacgccagtagatggcactaattacataaacaattcaacaagttaatgaagagggaaagaaatgtatgaggtttttttcgttcaaatgttgttatatgtcacatattcaacaattatatatgagcttatttttgtagtttttttctcttgtgataaaaacaattaagcccactttattgccaattaattgctactaagttgaaatacttgatactggttattgctcaagatgctgcatttgaaaagtttgtcctgaaaggtgggttaccttatactgtcatgattgactaaatcatatggtaggttaaaagcaatctaatatatgtattctgacctgaggattcagaagctgtttacgaagtattttaagacactccaactagagatttcataaaaaaaactgacattcattctctttctcataaaaatctatagcagttggccaaagacctccgccagtggcagacaaatgtagatgtggcaaatgacttggccctgaaacttctccgggattattctgcagatgataccagaaaagtccacatgataacagagaatatcaatgcctcttggagaagcattcataaaaggtatgaattacattatttctaaaactactgttggctgtaataatggggtggtgaaactggatggaccatgaggatttgtttttccaatccagctaaactggagcttgggagggttcaagacgataaataccaactaaactcacggacttggctcagacttctattttaaaaacgaggaacataagatctcatttgcccgctgtcacaaaagtagtgacataaccaagagattaaacaaaaagcaaaatactgatttatagctagaagagccatttatcagtctactttgataactctatccaaaggaatatctttctatctcatcatggcgcacactgccttacctgttatctgataaataagtcactttgggattcatgatagagttatagctgtacatggtctcatcctagtatctcactccacacacccaatgggaaaatttgtggagggcaatatgactcgtcacttcatttcccattatatatgaatggaaattaacagcgcttatagacagtatctcctcaaactaagccttgtatccttattatacctctcttgatctctagtgcttttttcactagcatttattccaatcataaataaaaatataaattatgtaactaattgttaaatatttgtcctttaaattaatctaaatgccatgagggcagagattttgtctttctcatttgatacatccccaggtcctgaaccacgtgatataatagggagctagtaaatgttttttgaatgatgactccctttgcagaatgtacaattaccttgtgcaagctgaaaaaatagcacctgtacaatatgaggaagaccacggtgaaaaataattgagttccaaaatatgacatcaattactgaaaaaataagctcggtgatttttaacaagaagtaaaagtcaccactggggccaaaacagattttgaactaagagtaggaagtcttaggagaaatgagataatgatatatggaaattaagcggccaactaaattttgaaactgagctagacattagagagtaaaaactcctgtgaagctgaatttaagctggtcaccctggggaatagagcaactctaatcctgaattccagacagtaggtgtatagatggaaaagaccatggaaaagaagattcaacctaaagttgggaagttttaattggagccctatgaaaaagaccctggtggagaaagggcaaacttgaatatggagctgatatttggaaaaattctcatagtaactactttttctcaatggcaaggcttggactttcttctcaaaatacagatcttatatgtgttcaattaaacagggacagattaggttcaggaagaattattcacatggaatcaattggtatcagagagtcaaccattagatcttagtgggaaatatctgcttctcaaagagaagtcttttggggaaagcaaattaaagtcagagattaatttgatgagtttaggtaatataaactaaggggccaagaaaaaagcttgctcatggtatgaaactagagcttgaggacactgatctagtctatctatactactctttctgacagacccctctcttcattctcatgctccttgatggcccaagccactctctcagttttttaaaaaattgttttatcaaggtctctggattcttcatgggaatgacttccagtttatattttttggcttggttccaaaaagctatcagctaaggaatgcatatacttacttcccctatgggtaaagtaaatgagaattttagaagccaactcacatttttagcctgtacagaatctgcaattcaccaagctacttctgactcatgtctataaagttcttccctgttcttttctcacttcacatgtactctttgcaagaattcatccacttgtgtagtttcagtctgttgatgactacccatctataattccagctgagaatgatcttttgagttttagacatgtagatcctgctgctttctttcgatgttaatgtcccacaggaacttcacattgaagaggtccaaagctaaactcatctttgccttcttccaatctctttctccaaatgcaacctacttctgttgtccttgtcttagtccttttcgtgcttccgtaacaaaataccacagactgggtaatttataatgaacagggatttgttggctcatagttctggaggctgcgaagtccaagatcaaggggctggaatctggtaagggccttcttgttgtgtcatgattccatgatggaaggtggaagaccaaaagagagaaaaaatggggccaaacttgtccttatatgaaactcactcccacaataatgatgctaatccgttcatgaaggcagagccttcatgtcctaatcacctcttcaaggtcacatttactactgttgcaatggcaattaaattttaccataagtttgggaagggaaaaacattaaaccatagcattctgcccccttttccccaaaattcttgttcttctcaaagacaaaatacattcatttcatccccaaagccccaaaaatcttatttcagcataaactcaaaagtgcaatctaatataaattagatatgggtgagactcaaggcacaattcatcgtgaggcaaattcccttccatctctgagcctgcaaaatcgaatcaagttcatcccctcaccccctacccttcccagcatcaggtaaccaccaatcacagaaagttttactgatagtcctgctctagatcatctttgtctatgttcactttagctatttatcctagtgttccattattggaatactaagcatgtgggaattatttatattctactgttcaaggtcctcaccaaggtctgattgcaaaaattcaaaaaattgcaaccttaggcataaatgggttaagcagtttagggtacatttataataattatttactgtgctacttcaaaaatcttattgcctctatttataaataaaaagtgttgtctctacacagtggcttgttgtaatgcatttacttgtttctgcctgattttttctatttatacattttcttttttatttttatttttattttttcacttttaagttcaggggtacatgtgcaggtttgttacataggtaaacttgtgtcatgggggtctgttgtacagattatttcatcacctaggtattaatcctggtacccgttagttgactttcctgatcctctcgctcctcccaccctccacactctaatagtccctagcatgtgttgttcccctctacgtgtccatgtgttctcatcatttagctcccacttataaatgagaacatggggtatttggttttttgttcctgtattagtttgataaggacaatggcctccagatccatctatgtccctgcaaaggacatgatctcattctttttttatggctacgtagtattccatggtatttgtgttggtctcaaaaactacaactatgacaggatggcattttcacttttgttgttatattaaactcatcttaaaaaggaaagattaataatgtcaatatttgggttatggagaaaaagtatctcatatctttgaaaaagttctgtaactatagctttttaggtaggagggattctgtggaaagttttctgattacatcatttctcacagttcaggttagacaccattttactatgaaacactaatgcattgcctgcactgagactttcagtcacatggagaaacctaggcaaaatttttgtacacttggaagaatatttaaattagtaataaaatctttagttttaaactgttgaatgttaaataagatataaaatgtacttgaaagaaatttgctttgatatcagacactgccatgttgcagtttcaagacataataaaaaagtaaactaatgtttatattttgctgtttaagtttattaatacatcagatgagtcttcaaattctacagtggcttttgatatgatcatttttacttgccattttatatagaataaatataaataggcatttatgcttaaaaggaactaatctatctatggaaaaaagagaaggctgcttctcaactaaattgtacagtttagaaacccagatctgaacatagattattgttgtgacctatgtaggaaaatatgttgttttccttatcgtagtccttacagagtccatgataacatataaagccagaaatgtgagcctctgcaagttcatttctttgtcttcaatctctgtgaatagatatgagtttgtgaataagataatattagatgtgatattacaaattattgtgagaagcctctaaggattagatttcaaggactgccatctggctgatgactttatgatgacactgtcatgagatttcatttccttatttctgttccaggatcactctttaaacaagaaataagcattaactctgaattgtctgcttgtagctgtatgagggcttccacaactgccaactagccaggtacaaactcatcaagcagaggagatggtccttgcatcagagggttaaacatgcctagaagttccttagctaagctcccagatactaaaaaatccctctaggttctaagaaagattcagcatgtacatgtgtgtacatgtatgtgtgtacatatatacatatacgtgtatatgcatatgcatgcatatacatacaaacacattttcttccataacatctcagtattctctgttctttataatactgttttgtattttaatgatcaaaattaatagttgatcatctgaaaacattttgacctgttttctccgtctttgacaaccttgaaggcacttgtaagtcactctttgcttctctattcctaggtcctttctcatcttcattgcaacaagaaaagagaaaacaattgagccctattttgtgtgtagcaaggagctactctagttaaacactagatctcttttacattctccaacatgttgttttagtaattattctactttcctttttttgggatattcaatttcttctttctttttgctcctcccctttagcaggccaacatactcaagtctccctcatcctaagagaacttttttagtatatcattttttttctatccagctgtacttgcttctgcttactatatcatttttaagcagtagttggcattactgtttcctgttctttagctactagttgtactttgacccactccagtctcacttccccagcaccaccactttatgaaaacaaggacttactaagatcatcagtgactttgtaatagctaattagtgtattttaattcgtccatcttcttgactatattttaacattgatcctgttggtcaactctgctaatcaaaactttatcctccttggttcccagaacaatattatcttgaatatctcatttctctaatcatataataattgtgaggtgcttggcacaatgcctagtgcgtagtaagaactcagtaaaatatcatctgccatcgacaccataaaaattaatttacttactcaacaaatacttttgtatgaagtttgtgctaggtaggcccagtaattggtacttggtatagagcaatgaaaagccctaccctcataaagcttatattcttggaagcagaagttggaagacagacattgacaaataaaaattaaatacatgatgtgtcagatggtcatacacacagtgtggaagaacaaagaggaaaacaagtggagagagagagggaggtggaagaggagtgctgccatgaaaatgtggtaatcaaaaaaggtcttactgaaaaggtggcatttaagcaaattctaaaagacctgaggatgtgggccatatgtataattgggggggaaaaagtagtccaggagagtcctaataagttaaaatgccccaaagcaggaatattcttggcatgttgaaggaaccttaaaagggagatcagttaggcagaaaaggatcaagcgagcaggaaggtagttgacaataaatttagaggggtaactggcatctgattatattggccttttaggcctgtggactttagcttttaatctgaatgagatgggagttattggagggttttgaatggaggagtgacatgttttgtcttatctggctcctctgttacaatagactaaacagaagtagtgagaccattaggaaactgttgtcataattcagtcaagagatgactgtggctgggatcagaatgggagaggtgaatgtggtgaggagtggttggattctactatattttgggtacagagcacaacagattttataatggaataaatttaggtgtgagagaaagagtcaagaagactcaagaatttttagcctgagcaacggaaagatggggtcatcatttactgagatggggaaggctccaggagtaacatattttgggaggaagatgtggatatgttacatttgaaatgcctattatacatctaggagatgtgtggagtagatagctggatatatgaatcttaagttatggggagtagctcaagatacaaagttgggagttgtaacaatgatcagtgcaagttctctgtcttcaatgcaattttaaatgttgatgttccattcttaattgtctctcttctttctctctgcacattttgagtagctttgtctgttggcttcagttaacattaagactcctcagtgtcaacttccatcttacactcttctcctgatctccagaactgtactttctgccacctaacctacattaccacctggatatgctacaggctgcaaaatgtgtcaagtagaatgcattatcttgcccctaaaagaaagttaaattttctgtgttttcagtgtagtgtaattgtctaacttaattgtctctaaaactggaaacctaagaattaccttctacctttctcttgatctctctttcccaatctactgacacatgtattaaactggcttccaaattctgtgaattctacttcaaaaattgctctagaaacaattccctctctttatccctattgtcacctcatcctaaagcctcttcatcctttgtagatttctgggagattgtaaccaacttttctctattctgccagttatcaagtctttacgctcatttgacattcacaacagccttggatctgtcttccttgaaatgaatcttcttgcttccctttgattccagtgctttttttttaccctcctgagacttgatgcatgatatttacatgtatgacatgtttccaaaagcattctcaaatttttctgaaagtaaaaacaaatgaaaaagtaaaacattttcctgggaagaaaagcaaatagtgttatacatttttgcttgttcatttgtttgtttatttaggagagggacaagcattagaacttcataagagtcttatatgctgtatctacaaataccgtcccttggcaatataattttagagttccttttctggaactacttaaggactgttttatgatcctcagcagactgttatattattttatagccataccttttatttgctgagtaattgtactcaataattgtttgtaattgaatgaaacaattcatcagatgttgggcactgaatggctttggattatttccaaaaatttaaaggataaagatttgctgccttcaaagctatgtacaaaaatatgatagaatgctagcgggatatttgtttaaaatacaacctttattacattggggcctgctcataatatatatgtggcacattttatttaaaatattaaagttcctggtgggacatgtccccataatcccagcactttgggaggccgaggtgggggtgggaggatcactagaggccaagagtttgagaccagcctgggcaacatagtgagataccatttctacaaaacataaaaaaaaaaaaaaaaaagccaagtttgtagtcccagctacttgggaagctgaggcaagaggatttcttgaacctaggagttcagttcaaggctgcagtgagctatgatcatgccagtgtactccagcctgggtgacgtagtgagactccatctcttaaaattaaattaaatttaaagctacaaatgaccccaaagccaccagttcaaccctctcaattttgaataccctattttaaattcctcttatgcgaaatgtaccttgtagtccattttaaggactgagaggatttggtatgttaaaaaattcaatccattatcaactcctttaggtacacttagcagtatgaaaatgtgtctttcggctcttcaggagagagtcatatgtatagttacaagacaatcccatttttatattgctgagacccaaatcttcccaactgattatgaagcataagaactcttcggaggtttaagtgagctgagattgtgccactgcactacagcctgggcgacagagcaagactttgtctcaaaaaaaaaaaaaaattctctgcattctacagtagggtaatataacatctatgatgtgaaatcttggggctccgggccagagagtgtcatgatccatatggatctaaaaggttcatagtggtaacagcctgcttcattttatgtcatctcctttcaagtaattagaatgtttctagcttgcagggattgcacacaaagggagacatttggaaccatgtcattggtgatttactggtgtggaaaattacctggtgatgtagccaagtagccattttcattctaacccagtcctacagtcctgaactgggctgaaccaacgcaccaaaatatatgcttagaaatgctcctatgtatcagttttcccaggaaaaacaatagtattatcgaaaacttaccattgtttcctaataaaaaattataggataccaacagactgttttttgttcataaatttaatattacagtatcaaatattaaagcaaatgggagaaagtttttcttatttggtttaattgaaccattaatgttagctacaatacccatcatgttacttttcaattatatttatattttcattttatttctatctgtatcattctcagaaagacttctttaaaacattcaataaaaatagaatttaggtagatttatttttagaaagttgagtttttttaataaatgaatataatcatcacttgacttaatttttttctgcacaattctagaaatcttatagttttgggatcctttggctttattcagtatgtaacagggatctgtttcctttctctaaatcattaattcaaatgatttcttatattaaaaatgtttggacatataggtattaatgagttttatgaaatctaatctttccaatttccccctaaaaagggatgtcatttaatcagttctaggttgtgatcaatagcagatttttttttttttttttttttttttttttttttttttttttttttttgcagctccctttcaccccgtagggaaacctgatatcatccttgactaattgcagcaaagagcctggctcaggtcctttgtcttataccgagtgtttatagattcttgagcccagcagaatctgaactcctggctactgctacctacttcccagcccaggccccaaaagccctatgtctgcagccccgtgcaccactgtgtgtttttgtggcatttctgaaacacagagctacttaacttgtttctaagcccagattgtgcctttttgattttctattttggtattttatctaccatttttctgtgtttggatgtttcttctatattttgaaataacttctttcctttagtacaagtgattcttattgtagaaactatcaaaaatttacaaataaagaatcattctcaacattcttagcaattccttctatcatatttttgcaaatatatttttgcctatttttattttacttactccctgtttattaacagttaaaagcattttcagatagttttattttttcatttaaaaaaatcttaccacatttttattaggaaggaaatggacaggtgtttatcttttcaataaaaaacatgggggaaataatttcttgaagtacatagtgacattcttccagccaatgttttatgctgtggtcattccgtctgtcatcagtattcatagaaagagatgaaaattatttaaattaactaggaaatcaattccccattcaaagcagtagttgtgtgtttcaaatatcttctaatagtcagtttcacacttagctttatcaaattcctaattatgatactcattacatcactctgtgtccagtcagtgtgtttatgccacagagcaattaaagcaaatcaggtgaaccaaattcaatcacctttgtagataataacctacgttgcttaaacttatggccgctcatacaattactgatggattgcctttttcttttatattgccagtattttaaatgtcctagtgaagttggggtagctgttgaacttcaactttatcacaacctcttttttaaaatgtgtaaacgaaaaaaccctccatgaaatgaccaaatacagttttcatgctgggacaaattagatgaataataatcataaattcataatgattatttatgattttatgtttttatagtgagatatgttttgttgaaatgtgttatataagtgatacttaagtttcctattaaaatagaaatgctaaaatggcattgttctctttagctgtgagtctagcttttgacctctgcttaaacggaactgttgttccatcccaaatctgcaactctgaggcctatgctcccttcactgctgtctaatggatacctatcaatttggaaggaggtttcaggcagctattcccggtaatctaatctcagctctgtccttttcaatattttcatcagtggcttggatgaagacatagataacattcttatcaaatcaatgccacaaagcagggagaaatagcaaatatagcagacaagagtatcaggagccaaaaagttttcaacaagttggactggtaggctgaatactgaaagatgtaatgtaaatgcaaggtgctacatgtgggttcaaaagaaacatgaaacaaaaaacccatctaacttagactgggctccctggaaatagactaagatagagagttgtgtgcataaggtttgttgaggagtgttcccatgagatacatgtgtaaggttgtaagataggcaagattgcacagacgaagaagtgcagtgaagcctgcagtgcgttgcggcctcatcagattttcaggggagttctggaaattgcatggccctttagagacacgctgaattgaagcaagggatctggacctttgaacccaatactagagagttaatggtcctgggtcaccccatgggaaagagcagactggagtaagattgttacctacagctgaaggcaatttccagggagggaggcagctgtgagctgttagtagtcaatattccaaccagctagggcatgaggtcttggcagagcaacagtgtacccaagaccgcagtgttacccaaagtatggtcctctgactggcagcattggtatcacctatgagctcactagaaatttaaatttgtaggtcctaccccatccaactaaatcagaatctctggggatgggacttggggaacttttaacaagctttcaggcctccaagttatttctatgcatattaaaatttgagaaccactgcctacaccaaccaaaaacattccaaatatggagataacatagagtttttagcaacaataatctccttctgtttcacttctctctttacacacacacacacacacacacacacacaacacacaacacacaatgtgatagaacagtgggaaaggaaagccaaaggggatcttaggccgaataaatttaagcatataacctagtcctaagaacgtatatttcagcttaatagagagaggaatattgttataaagctgtccaaagatggaacaggctgccttgtaaagttgtagaagtattcaggaacaggttggtgataccttggtggttgtatggtataacatcctgatcttcacatactcatcatctagagtgggagttttctttttccaaatggggttttggcagaactagttccactgtatcttaataagtaataactcaagaaagggttctatggatgaaaaaatgattaggtaatatcaagttaaatcaaagcgaacagacttctttcccataggagtaatcagacccttattacagtgcatgcttggtgaatcaacaaagtatgtgtatttatgaaagtatggggggaagggataatctatacagtatgcatcccttctaaaagtttgaccatgaaaacaatttctcaagaatcttatacaacactacagtatctggtccaatactatgcatagaacatgcactcagtaagtgtttgtaagatagatagcatagcatataggccaggccactgaagggaaatcatctcaccgtgagttacctgaatagtattctctagtgccattagctcaattcttcacgtaggcataagcctatacatttgccatgctaaccaagggaatttgtgttacgtgaattttgactctattcagacatttttttctatgactcctccaaggctgttattcttacctcatattctggtagaagtttaaggacttttttctgggaatattgattaattagctagctagctagagacagagagaggatagagattgattctctggcagagcctatttgaatcatattgaatctttttttttcctgagacttcccacaaggaggatggaggagaaattttttagaaatccaccgaagtaatcagggatatcttcagtaaaagaagctatacttaataaagtctctattttagcagatggcaatcaacaatagaggcaatagacaatagagtctattaaaattgctgggatctgctaataacgtttttcttttccctgaaacaaatgccattaaccctccttgacactctgtcttcatcaacattctaatagaatggaagtaactcataattttgaggatttttttcccacacaaaacctataaaccacaccacgctagtgattacttttagcctagttgctaggttgctgctggtaacagtaaaacttatcctgacaggtaggcaattccagaagcccagccaagcacttggtgtgtgtgagtaaacccccatacacttctcatgtagagtaaccctggccaacccataactcttagcaactattcctggtggacggacctggtctactctaagaagaggccaaggttctttaatagtgcagttgcaagaaccagaattgaaagtcaaagttctagcaagattttgcagactccttggcaaaccagtggcttgggactcattcttgacttcaagcccttaattgataatggtaggacagcttgcttgcgctgggttctgctccctgggatatgcactgtttgccaaatgagtagcaggtggacagacatctttacaatttgctgtcccatattctaaatgaacgtgacattctataggtctgagttaacctatgaagtcaccaatttcaatatcaaaatatttatgacagagaaaaggatactgaggcacagagagtctgtgactttcctaagctcaaaacaccagtttgtgttaattctgacacagaaattcttgtatttgctatcagtctcctttttctgtgtgtgtgtgtgtttttacattgcagcatcacctatatgatgttaggttctgtaactttttgagaattttctcacatacagtgatgtgttactttttgatatttcaaatagttctagtaagtcttttctacttttattagcgtattaacatactggctctaagagggcatctcaccacatctttgccattcttcctggaaaggcaagtttctctccatcttcttttttgtattccaaagttttgccaaagtttgcttttgaaaatgggttacctggcagagctttattattctaactttgaaagtacaagtcagaatcagacagtggcagttatatatgcactactgtgattactatataatgaaagtatctatggtgaaaatactgatactgacatatatttgccattttctaattaagtgcttcagtaaaaattaagcactcactctttgccagatactgcaatagatattgagcacattgaacaaaattctccatatacatatatatgagtccacattctatgaaagtataatgtttttctgagaaaaggcataatattctattaatatcagcttttgcttcttccaccatatattgaaagaattctgaatactgttataatttaatgggagaatctagagaattctgtatttgctttcactgcattgatgaactaagatttttaaaaaatgtattcttcatagaactacttttccatatttacctaatattattcttatatcatttgagcacatatttcactaacaaaacaaatgtgcaatgttattagttctaacatcaaaattacactgatactttaatttttatcctattatttttcatgcagattaaaataattatagctacatcacatgttgcaagttttaagagctactttaaaaatatatgcttcaggaaagacatgattagatggggaaatggatgatgttcatattttcaaatgaaaagttttaaaaaagtgcctatcacaaacactaaatttttacataaattatcaactactaatatatctacaagaaataccatttttccctacaaaaactcttaacaataattgttaaacttagtcctggaacctgctaatataatcggacaaatgttgtcaataagaaggtgaaaaagaaagcatatatagtttatcaaactataaaatatagtttatcaaaaccaatttttcctattgacatttattcaggaaggaaaatggatgagtgaaatgaacaatggtctctaagagaggtgggagatagcaataaattcagaccacgtttcctgtcattacagcagggaagtaaaagagctacagtcaactctcgaaagtacttgggggaactaatgattccctgtagacctgtgatgtttttgaaatttaattcaacaatttgatatacaccgcaaagcgaacagatagtcagatcaaaatcggaagaacgattgtctgaatggcatccatttttcctagatgtgctgtcccatcctgtgtcaattaaactttcaggtgatcttcaaacatatttccaagtaaaaggtattgcagttatcctataaactggcctcttccccagcactgcttttgctgtggtcaactttatttctttgggctcacaaaactgatagagcaaaataaggaaaacggaacattggattaaaataaattaattcccattctgtgactcactaaaaaaaaaatgataactatgcttctgtgagcattaataaggaaatgaataaggaaatgaccaaattgttcagtggacaacttgtatgggatttttaagtattgtgtcatcatcaatgttgtcaattagcatatactttgaaatcaactaaagcaaatcagttgactaatcattaagggtctttttaaatgacaacatctaaacagcaaatgttttattttggaaaatcatgacagcacaagaatgagccagatgttttacaacatgatatccataatttaaagtatgtagtagtcactcaaaggatttctatttcagtttccttatgatttggctaagctagaatttggaaaaacactttaaggtaatgtgagaaacagcaaaattcaacatgtggattttttcactaaagcttatttctgattattttttacaaactttactaggtatatgttaacttcatgacacttatagcagtggaccgtagttttaataaaatgtgaatgtatactcttttctcaataatattaaagaatgttgactttcgtgaggatatttttatttttctcaacattaagaactgtcaaagatttaattctacaacagaagacgtgaattttgttttctaaaggagaacagaatctatagaagaagtgttgctcatagtactcagattgttgaccaatcttaaaggagaaaccgtcaattaatttaccgagaagtaataacattatctttttcttcaattatgcacatccacaaagatttggggcaaaatccacttaaatgatattatacataatagatgagtattcatatgttgtaagagtcctggcttctttcctgcaaaatgattaaaacttggatcagaaaccaattaaaaatccattctaattcccaaatgtatgtaactgtactataagaaaaataaatatttcttcttgagggatatccattagttaaggatattcataacatggtgtcttgtaggaaatgttaatctttgggtgaatagggatgtttgggaataacaagactcaaagagatgttgcacttactcacttttctctgagttgttatttctgtcatttccccagtgcgcctgtcctcaactttgcctctctccttattcctttttttttttttttttttttgagacggagtctcgctctcttgcccaggctgtagtgcagtggtgcgatcttggctcactgcaacctctccctcctgggttcaagcaattctctgtctcagcctcccgagtggctgggattacaggcacccaccaccacgccctgctaattttttttgtatttttagtagagacagggtttcaccatcttggccaggctggtcttgaactcctgacctcgtgatccacccaccttggcctcccaaagtgctgggattacaggcgtgagccaccatggccgatccctccttatttctttttatctctacctctgcctcaatggtatttctctattactgttagcatttgctttctgtgagctcttgcacactgtcagcttatatacatgttcctgttcacatgttttcctgtccccagtggttacaacatgtcttctatctcagcccactctagaattgtcttacttttccaggtctcctgctcctcagtatttttcccacttttctagattcatgttttcccatctgcatatttctcttccatgtctgcactgtcatccgcttagaagacagcgcataaggacactgttatctgagcaaatcttcagcacagccaccatgaagcatggttaccttgtcactttccatttttcccatagtgtgtgcaaactgccctgatctgcatagaaaggtatcataattgaggaaacaaaatgcacaaaaatgtccttggttattccacccctcagaaatataggagagaagtaatttacagaattacacagaataacgctatgtcacatggacatggagttatcgggttagcatataattggaaaatatttcctaggaccttgacatttactcactttttgttttcaaattacatgtccctatctattagttgcaaattattttaatgcaccgtttaccaaagaaaggctgtttcttctgaaagctttcatttgacaagtaacttgtaaaaatattcacattgtgtatctgttttccccttctagtccaaactctagttatcttaaactttgcgcagttataaaaaatcataacaaaaaaagcttcctcgttgtcattcttgtcaaaacaggtttaccagacttaggtaaacttaaaatagttagtgtaaaagttaaaaagctgatttgctccttccagcgtgtttgttgcctttttgccacagcaaaattgtaaatgtaaacgtattccctaggagatgagctgggctgcaattttcagctaattgggagaagcagccctgagttgagcactgtcaggctgatttgagtcttaagatatgatgatgattattgtgtcaaatgtaatcaagaacgtgggctctgaactgactcaagggctggctgtttttaattcaggttcgtatatgaagtagacctccggttcaccgatagtcacagctggttgtagaagagagcaatttttaaaatgctatttcattctctatggagctctagggatcagagattggatgcacagggaggggacacatcctcattctctcctgaaaaattctattaattttcagtataataaactttctcttgagattccccagtggctctgtatcggtggttttcaaacttctcagacccaatgccacccctcttttcttttttaaataacaaatactttgtaataccttctttacgattataagccaaaatatgtagacaacataccctacttatacaggcaatagtttaaatgatgccgtaactctattttaaagagaaataagagtcatttataataaaataatatgtgttgtagtatgcagttattcaggcaggatcacactggaacacaagtgaagtttttagatcacgagactatcaatgcagtataaacaaatgcagaatgacaccattgtgttgtatggagactcaaataccatgaggggcattggtcatccatagcgtaattttccaaaatgctgaacaactcttggcaaaattcctaacaccatgaaataaattttttcttggatcgttatggcagttagttgcatggctgaaaaattcaatgtcttaaaatcatgaggaaaatatcttatgtttacgtgtaaaattgagttacgttccaggtttaggtgtttataaacagggtttccacatacatgcatgtccagtgggatattccaaagtgctgtcagacttgggagagttctttgttgtataagaagtctaccatcttcattccctctccacagaatgctattatagtaacactcttcaatcactgtgatagtcaaatgtcctccctcaatttctaggatgcctcttttttttgtggtctgtataatttggttaaatatctttccagacaaatactgatttgtgaattaatgaaatagcagtattttcggagcacctaacctatttctgagtgatacagttgccatttttacaagactaaatgaaattaccatttcagacctgccagattgtctagcccagtcttttacaattctgtgattatcactgcaattataatctattttcaccacttgaatggcatgatctctataaaagggtggtgataacactcatctattctccttcccctcacatagctatatcaatcgccccctaaccagttgttgataaatgcagttgaattttatgtaaaaattataagagatattattgtagctgtccaagacatttaaaatgctaaatgcaacttacgtggaggctataagagaaatatgaacccatttattgaagagattagctaatttagtaaaacaacacagatatacctgcatacagggataaatccctattgtctaaattattgagataaaataatgttttacaatgaaaaacttttagacaagtaggtaagtaaaatgcagcagtctatttgcatttcatctgggcatttgacaaagtctttcgttatactcttgtgaataagttggagaaatactggctagatgcaagataaattggatggcttagaagccacttcatgattttacgcaaaggatgtcgattaatagaccagtgtcaggtggtgatggaagatctctggtgctatgtcacaagcttctgttctcaaccctgacacactggatgtttttgacagaacatgagtagaactacagagaggaggcccatcaaacttatgggtgataaaaagcagggagggcaggagtattttgggtgacagaagccaaatgggtgtctggacaggatgcgttttaaggcacttttggtacttgatgtctgaagaccaggatcaaacttataggcaatctgaacatttgccaaaataacaggttaattttgacagaagttattatttgtatgctgtctatttctttaatacacctagaaagtattgaaataacattttttgcagacactcattttgaaaattcagaaaaaaaattgttaactttcgtggaagagtaacagaaactcagtcattgacagctaaatacaatgtgttgcccagtaaaatagtccaccccttcactttcatggctaatataaaatttgatgaaagatacaaattccaaagattgaatatctgtacatttgcaaagcaaaacacaattttgggcacagaattgctcattctcatttttaaacatcttggttataactgaacaatagttttttataacaaagataatattttcaaattattatgaggttcaactgaaataatttatgtgaaagcaatgtctaaactctaaaattctatataaatataaattattattcaataaattcacatcaagaaaattttaagttttttaagaacaagagcctatggccttgtttttagaagctgtataccttatcggtagtaggtttattgactttaattaaatttattgagtatctattaaattgccaggaactgtggtgtgaatctttgccctcaaataatttacagtaagttgtggttgatgaatggtgatgacgatgatgaatatccagactatagtaagtggtatattcataagtcagaggattcttaaaaccagatgcaccctcagattcattcctttcatgttgtacttctaattgaaaaaaataaatcctaaattatgactgttctttataaattttaattgatcttataaaaggccatcaatacatttcaaagtatctaggtcttttaaatgcaatttttcaccctggtaattaaaagtacgaaagcaagaaactttaaatctttattttgataagttttaattagctcaagctacttgtaatcccacatcttgtcttgtaaatcatatctgagccattaaaataggtttacaattagaagggcaattcttttagaatctacttaaactaagtcacttcgacaaattaattcatcgttcagttggttttattaaaatgtatttatttcactgtaaaatgtctagtaaagcaatgtatgaagtattttattttcatgttagaaattttatgtaaaagatatcccaaaatacatagacattcagatactctctgtatcattaaccaacatttactaacttatcatttagagaaggccaaaattgtatgtactataactttgtataatttcataagaattaaaatattcgattaatgcctgtaatgccttctttctaaatcaaatcctcaagcttacctcgagttcaaagttcagtatttattgtaacacatctcatagatgacggatgaagatggtaagcaaaggaataataatttcttttctcttttcacacatatatacacacataccccataatcctaattcatataataataacagaaaacaaagggcttttgagaatagtgacatattaatatccattatatttacttcacagggagactggcaagtctaccttgagaggtaatgtcttatagtacagtggactagattgtttcaagatttgtcatttattttggcaactcacccagcttccctgaaagttaagttcctcatctataaactgttcatgataattacaacctgcctcattagcctcatcaagctatttaaaatatgaaaggaggtgctatctgtggatcctgtcaaaggagcttgaaaactgcagaacattattttagtgtaaaatactataacaatacatgttgaatataaaatggctttttcttaacttttattttaagttcaggagcacgtgtgcaggtttgttatataggtaaactcatgtcatgggggtttgttgtaccgattattttgttacccaggtattaagcgtagtacacattagatatttttcttgatcctctccctcctcccaccctccccactccagtaggcttccacgtctgttgttcctctctgtgtccatgtgttctcatcatttagctcccactaataagtgagaacatgcagtatttggttttctgttcctgcattagtttgctaaggacaatggcctgcagctccatccatgatctctgaagaatctccacactggttttcacaatgactgaaataacatacactataaccaacagtttataagcaatgctttttctccagaacctgttatttttgactatttagtgatagccattctgactggtatgtgatggtatctccttgtggttttgatttgcatttctccaatgatcagtgatgttgagctttttttcatatgcttgttggtcgcatgtatgttttcttttaaaaagtgtctgttcatgtgctttgctaaaagggccctttcaaatgtgtattattaaccacaagagagtactgagtaagagactaggtaataaaagtcacaaatatttcgatatcataattcagaatttagatcagcggttatgaaattgttcgtatttccaaattccactgacaggactctactataagtttatttcatctgttgatatgtttttagccacttctttcttttaaagtgaatctgttgtgtgtttgccatttgatattagaaaactgaacctgcctgctttgctgtcttctgaatattatgtatcaacaactaacaagctacagttagttgttttgttctgtttttctctaagttattgtggatgaggatatatataactgcacagtcttatcaggtttgtaagagatgatcttaggctcatcttttaaattggtttttatactattttaaacaaatccttttaggagagaagaaaagctgcttagtctatcaacattaggaaatatatctttaaagagtttatcactgcaagtaaccaaagccaacttaaaaattcgcattatacaaatcattgagaatttatttagaacagaaatgtgtccaactataggtcaacaccaattttaagtgtgtaattatctgggaagtagtgttaactgcatttttttctaaagatcccttacagttgtataaatgcccaaaaggatattttgagtctctgtatattaaccaaaccaaatgtaattcattactcccaacattatatttcaacctctccaaatagtaccttttcgtattgtatcagcagaaaaatataaaatgcagatcttaaagagtatcaatctctttaaaaattcaagaaagaaaaaaatatgtgtgtatagagacgtgtatttcatctgctcataacactgtgtacatttctttatcaactaatttttttcagtgatttatgagttgaaatacaaatcaaatgaaacgggtaatgcaaagtaaagtagaaaacacattttctactgctgtctcctaatgcaggtcttttcaggaaagtactaatggttttagggaaagtgtataattatggttgtttccctaatgataaattcgcaaatctctattttaaaaacattcataaggttaaaaaaatgagagatgaaatgtgtctttcaaaattccttacgtgattgataatgcctatactctcttactatctaaagtctaggtgatatgtatattttttttaaaaaataaaatgtctgtatcagtgaaggaagtttacacagatagcttcaaagctgtggtttatctttggaggattaatctatttctcatgccagtgtgttgctactgcacatgttaaaaagtcatcctgtggtgtctggggtgacaaaagatgggaatgagttttctgagaactaatcagcaatactttgggaacatttaggtcatggtttccaattaactctggagagtttgagtaatttagtaccagacctcaagagagaggggatgaaaacctcgttaattcatatgttggtgaacggcaaaccagcaaatttgcattaaaaatggatttttattttaaagcaaagagcagccagatcttttctgcaatagtttgggtaggagaatatctttgtatgtatgtgttcccttatgtgtaggtatttgtatgtttcaacgaccctgcatatggcaataacagaaaattaaatttgtgctctaaaatgaagaccaggattcagtgacataatcttccttgtgcctttctttcttttagtacaatgaatatatcagagaggagtgtattccaatatctgtcttcagagttacaaaaacttcttttctagaatgcaagacttgggctatacccccagctctgccacttaacttgtatacaaccttgggaacatcattacaattctctcagaatcaatctctccagccctaaaatgaaaccagcaaaagcctgtactgtatatctaaaaggttttttatttttatgaaaattagttaggcaaacttttgttaagcatccatcactctattttgagataaagccttgctggatgatctccacctcttttgatggaaagagtaaaacatgtttaagatacatttatcacttgtttggcaaattgagatagaagtttatgaaagcagattgatatatgttacatttgagctactgggaaggactccagatggtttatagccttaattacattgtaactctagttaaatgtttacctatctgtaccctctgttaaacttgaatatgttaaataccaaagtccatgtattattggattttctgtcaccatcatcaggcacagatcctggtacacaataggtacggaatggatgcatggatgaattattgaattagatgttggtaggcatgtggaaataagaatgaggttcagaattaaagataatctgtatcgagtgtaaagccattggcagagaatgaaatatccagctgagtatacatagaaaaagaaggtaggtagaaaaatggaaaatatcttatgaagtgatgatagaataactctgaatatgtttgaaaacatataaagagttatgtggatgttagctttaaaaattatcttccatgctgtacattagatctgccattcttcatgctgtggatgaaaagcaagcatcagaagttaaattaaaatgatgtcatatattcctcgccttacagtttcataacagaggagaaaagagaaacattctctcattgccaccacccttctccagtcatatttctaggtagatgttgcccaaaaacagataaaaccacagagttggttttgctaggaatggactactaatccaggcaatgttgacagcttttgcttctcattagtgcacgttactaatagaattgctagagattaaaaggaatcctttctacaaagtgctgtatatccataggtgacaaaattctagcttcccctcacaagtacaatataaagttatgttttaaaatcaaaatgcaatttactagcaaactagtaggaactgttatggttacaggaaatttgaatttcagattaactctggttctatgagtagcggttgatatggcaagaatcattttgatcttacatccaggtgctactaaggtctctctgacctatatctcaccaaaaaaaggaacaaaataatgatcctttaatctttctcctaaaatatcataggaaatgatagtggctaaattgcaaataaactaggaaggaaagattcagagtattttatgtgattactctataacaatgccaggccatagtgaaagtgttatttagcagaagactgagttctttgaatgttcctaatttatcacattttaaaaataacctgggcaaaataacctttcatatcagattgagcctttttctaaaaatactcaatatgtttctgtaattatacctacacacttacaattccacagtataatgcaccgataaagtatttttcatccatatatctaatagtagaatggtgtgtatacaataattaagctctttaggcttaccccggaaagcaacaagtttcccttcctttttcctttttatgtattatgttggccataagaaattgatgatattcaactcaatgcagtcttagagatttattcagaaataccatggtgtgtgtgtgtggcgggagtagggttctaatgacaggtcagaacttacttatttgatttcttcattgataatcaggtcttaaaaagaaaatgggtatgctgaaaacatgccttctgtgattctttaccttcatgtgcagttgtctctggataaacactttctttggcacgtatagggttgcactaagctttatagctccaacactccgccccttcagtagattcttgcttgtaactgatgataatgcaaacctgtattatctataggtctccttaaagggcaaccaaaagttcagtagcaattcaggcacaattactgcatgtgagaatcctccatcttgttccctttggagaccacatatatttcttaggcaagtatatttttaaaatccttgttcagcatgacaattcaggaggtcaagttctcccagaaagcagattctgagaaagtgattagcatgaaggaattttattggagagtgctctcaggattaacacctgtgagcggaggaaaggaaagggagcaggattgggcagaaggagaagctgggctaccatacagtcacaactacaacacaatcaaccctccgcctctccttcctagccttccccaggaggatctctgaagtctgaaggtagaatagcccttcagaattgtcctgagttgcagcaagggacccaggattttataccccacaactctcccatcaaccaatacgtgcagcccgtctcggggacatagtgggtaactttgggctaggcacctctctttagctgagtccagctctcagacaggaataacagctgaggactgtcagccagtagcactaccagcagctggggtcagaagtatttcagtcctgaaaaggggtccgggcagcccagcttagcatctactatgccagtcgttctcaaatctggttcctggcaactgtgattctcaagctttagcatatattggaaggcttgttaaaacacagcttgccggattttacccacagagtctctgattcagtagagctaggctgaggcctgggaatttgcatttctaataacttctcagacgttgctggtgctgctggtccatggactatgagaacactgtttcatgctgcccttatttacatactgagaatggtacacagtgctcttatgaatagaatgaaaaccttttgaaatcacattattccttactccatcaaattctcagctatttttgtgcaccataaagctggaatagctgattataaaactttgttatgtaaaaaagtacttaaccaatacagtagattctgtttgcaaagcattattacagtttctaatatctggtcattgttacttgtaaaattcagccaaattttctccagggcctgtagtttgataacttggacaaaggaatttaaaaaaaaatctaattcaagacctttggttttttttctgaacatatcttttttttctttatgattcttatttttacattttacttatcatataagccacttaaacccatatggttccggaaaatttaaaactatatgatacatttagagcatgttgaatgcacagatatggaaattaagtattcttgactcattctagactagacctggcacaattaaaatttagggattcaacgtacacacacatagattccgagagaaatgttgaagccgtaaaacccccacacaagcaggaaacaacagtcttacctattattcaagaggcacgtaaaggagctcatttgaggagattttctgctgttattgccatcgaatttttaacgtattttccaaattagaaaatattcagcctgatgttgtcaatatttcagaccacaagggtatcatttaggaaaatggtttcttactgtcctgaaagagttactgttcttccctaagggcctaatttacaaagcagcaaacttgctggtaggatttggctgaaaatcacattgtctcggtagaactctttcatctgatttatgtgcattgcattttgcaaataactcttggaaagttatttactagttactttctctggaagcagagggtaagcggcatttctagtttaaggatagaggagctaagatgcatcaagcgcagctcatcatgaagctgatgctgataaaatgcacaatattacattctctaagtttcactctgccatgggagaatttcatatttttaaattttgtttgaaattggactacattagaaaatatgtcaaatgtctaaccctgcatttatattctggaatgtgacagcttatttctgttccaaattttgcactggagatggagtaagtcttaatgcaaactgcatgaaactgccacttttataggtcacacccagtcaattgtcagcagttacacatggttcaaactgtaaggtgtatgcccaattgtagcattgagattcgtggagttgttgcagtggttctgaatttttcaagcatgatacataaaaagataaatgactcttttgatatttctccttgcattgatagtttgcctgaaaactagataagcagggagccggcagtccacgttagcccttgaactacatgaggtttaatttatttgcccaaccagaaccctacactacctttcagctgtgcagtattaaagtttatttaggagttgataaatagcttagtgcaatgcttccttttttccagtagctacatcctcataaacctattctaccctccaccagttaatgcagacagaagatttttatccagtatgagcactgaaactccactgtggaagactgtgtgctcagcaaaaacctcacccatgatgaataaacagctcttccgggggctttgctgccgctggctcggcaggagttgtttattgcctggtttgcacatcccatgataaagttgctgctgaaataaattgcagttttgcataattattgacaatcacatcttaacaagcaatgtgtatcatattcaagtgttcaattttttaaaatccatttttagcttatgtttaatcccagaaagtgtttgtgtagtaatagaaggcaaataagacatttaaatagagtactaatttcctcattgcagacaaagtttacctgaatctttttccataggactgttactgcctaaggcaattttcctttctaagctattattatatagatatttgctgagggcatatgtgtgtgtatccacaatacatgcattttatatatatatatatatatatatatatgatcaaaaatatgaatacatttttagagtttttgtcatgaaagagtttgtttcatctttttaaaatattacaggaatggggaaatgggatatgggtagaaggaactaatgtttttgagtaactgtaatgtataactgtataacgtggggcactcaacttcacaggaattttttattttaattctcatcacagcaatagatattgcagatgagaaactgagaatcagagagggaacttgccatatcacgtaagtggtaaagaacactgggaattgaactcagatctgcctagtttttaaaactctactctttttcattacacataacatttttattttggaaaatgttctcagttgtatgatcaagtagttaaatatgaaactaacacaataattataactgatgtcatgcaaaatgatagtttgcacaaaatgatagtttctatgaaatgttatttctttacttgttaagtctttcttcctttgccctccaatccccttctttttgtcttttcctctagtcttttccttttgattctaggtttgtattttcttgacttttctccttgcatatcaaatccttgttttctgcctcagagcagcatcaaagacaagcatggtacagggattttagggttttaactataaaggtttgtctcaaatttggcagtatattaaaaataagctttcaaaattgaccaacaaaaactacaaaattgaaaaaaaggtactttgaactttcacatgttcaaatatatgtatatatatttcacatatatatatgaaacctcctctgtggagaggggtttatagaaatctgtaattgtcattcttgcatgccttcccccatacaaacgcctttaagttaaataaaaatgaaagtaaatagactgcacaatattatagttgttgcttaaaggaagagctgtagcaacaactcaccccattgttggtatattacaatttagttcctccatctttctctttttatggagttcactaggtgcaccattctgatatttaataattgcatctgaacatttggtcctttgcagggtgagtgagcgagaggctgctttggaagaaactcatagattactgcaacagttccccctggacctggaaaagtttcttgcctggcttacagaagctgaaacaactgccaatgtcctacaggatgctacccgtaaggaaaggctcctagaagactccaagggagtaaaagagctgatgaaacaatggcaagtaagtcaggcatttccgctttagcactcttgtggatccaattgaacaattctcagcatttgtacttgtaactgacaagccagggacaaaacaaaatagttgcttttatacagcctgatgtatttcggtatttggacaaggaggagagaggcagagggagaaggaaacatcatttataattccacttaacaccctcgtcttagaaaaagtacatgctctgaccaggaaaacatttgcatataaaaccagagcttcggtcaaggagaaactttgctcagagaaataacttagggattggtttattaaattttaaaagttgacatttttgagtgtttatttaatattttacagggaaagcatctgtatgaattgtctgttttatttagcgttgctaactgaatcagtttcccttcattactttcaaatatgttttgaaatgttaatctggcattttgtagctttcttcctaacatgatctgtgaaaataagaatgagatggctgaatttgtcgtagttaatgatcaaacaattttcagacaattgtttttcctagaaacaaaaattatttccataaagttccatatgcataaacagtgaaaacagaacgtggggtagttttgtttaaatgaagtcttggtgagaatcatattctgtagtacaaggaggctcttaaagtttattctcaatacctgatataattttcctgaactattatggagttttgttatgtatagttggtttttctgacttgatataataactttactagtctctcaaatacaatttggatataaatcattataataagatgattgattttttagactaactttattttttgatatttttaaactattatgaaaaactattatgaaactattatgatatttttaaactattatgaaaagtatattctagtttgaataattccagaatcaaatcataataagcagaagttcttctcctctccctcctatcgttctccttctcctgtttttcttttttgatatgatagttgatctactttgctgctctgttgcatagagtacgtaacagtggcaatgtatggctcctgaatttatcgttcttgcttcatcatcctgctttgaccccactttctcctccaaaatgcgtgttgagttagtttgatcatttggaggtaatttgtttggaacagtatcagactttatagatatctcccatggcttgtgatagaatataagggcaatgcaaatgtagagttttttgctcactcttcgatgtatggttagacaatgtaccactgtaatatatttggcttaggctatttcataaataaaattttattataaaatattataaatgctgataaagctactccagaattttaatagatatgtgggtttcccggccagatgcggtggctcatgcctgtaaccccagcactttgggaggccgaggtgggtggatcacctgaagtcaggagttcgagaccagcctggccaacatggcgaaaccccatctctactaaaaatacaaaaattagctgggtatggtgacctgcgcctgtaatcctagctacttgggaggctgaggtgggagaatcgcttgaacccaggaggcagaggttgcagtgagccgaggtggcgccactgcactccagcctgggtgacaaagtgagacttcatctcaaaacaaataaataaataaataaaaatacatgggtttacattttacccatcagctatggtaggtaaataataagctttgattaagtctattttagtctatttttagcagattactttgaaaaataaagaataacccaatgactaaaaaattattttatgtcagggatttaataaaacatatctttaaatctagttgagggcaaaaatacgtctattttctactatacaatttgtatttatatctgctgtattatataatgaaaatttatctctatttctaatctcaagaaactgcaagcttctgaatcattaaagggaagattcaccatgtgtcctaactatatttactatggaagcatggaaaataaatattttatgtttagatttctgatctctctttcaaaagcagttggaaattatgctgagaaaatgtcttagcttatcccatgttactcaagaaaatgtatttattcgtttttgtccagtggcttaaccaaaccacagtttatttgttgctcacataaagtccagtgtcgatcaggctactcttttccatctttgagctaaggcacatattacacataactttcagtgtacccgaggtagaaaaagagagagcttgggaataaggcaggggctttttactgtctcaaccccaaagtgataaactacatttattctcaaaatccagataaaactcccatagagcctctgaaaacctcaacatttgcgtcttaactataataaggttaactaagattccaaaattattttaaaacagagacagtttccctcttccctggcagctaatattgtattttctataaatccacttgcccaaggtttaaactacattttatggattgaaatgacatttatagccaactcctgatttttagttagatggttggataatgatcttttgatgaaagactcggagatgtcatggtaaaacggtgaactactgaaactattgattattgttaatggcacatttcagctgattgaattgagtcaagaaactggtgttgaagagcaacaaatggaaatgccgagcttgaaaataaataaagcagcataccttaagagattacatgcaatttcagtatttcagctaaatggaagtgtttgctttttttcctctatgaatttttattttgaacaaaaggaattttctataatatgtaggtaggagaaaagtgaaatggcatgctttttcacttcatttgaagaagctggtagcattgtattcatagattcatgctgtatagcaatcatagttctcatatattaaaaaaaaaggaaatttgaaatgcctagccaaagcaacagctctgccaacagattttgatatatctgtctaccccaaaagtagtgatgatttacttcatacaaatgctagtgaatgaagagagagggtgaaaaccttcacaaaatgtgtttttctctaagactgtcaatccgtttttctatatatggagactccagctcttgctagactacctatcactttcgtctatcagccacttcgtaagatatttattctctcagcaataatcataattcatagattctttaaacatacatgtaatataaagcatatacattctgaatggaattaacatgattaattcttctctgaaagacattagaatttcctcccgtattataaaaaggtgtaactcactttccttactaaaatcaagaactttaccgtcgtccttgtacttcaggataagggggtgtttcttataaatattgttatttctgatatgctaactggaatttttaagcaaatgtatttttatagaacgccatacaaagcctttaggggtgaaagtttcaggatttttaaattgcagatttatcctttaaataaaaaaactatattcgtaattgaatcggattatttctctatccaaaacattttctgctttgggcctaagaagagttgacaaagctgttcatggttcaaagtactaccataaaaccctgggtaactaactgaaaatggaaagactctgtctttctgaatatttcacaagagtttcacaaatattaagtggttctctaagtacccctgagagatcattgtaatattagcttgtaaagacaatgtgggggtgtgggtatgtggtgacctttatgatgttcataaaggtggtgtaattaacatatttttctcagcaagacaaactaaggagcaataaatatatgagataccttcatctgtgatctgggtcatgtctcaggccatatctttcaaatcactcccttccctaatctcgtgttttacctacgtctcctctcaatccccccattataaaaattgtcttctgatgaataaaacatttccagagagacaagtttcataaagtttgaattgtacatctgagtacacctatgaattaagatatctttgatttctaatatgttattaaaattgggtgtggtggctcacgcctgtaatcccagcactttgggaggcagaggcgggcggatcacgaggtcaagagatcgagaccatcctggccacaaggtgaaacccccgtctctactaaaaatacaaaaattagccgggtgtggtggagtacgcctgtagtcccagctactcaggaggctgaggcaggagaattgcttgaacccaggaggtggaggttgcagtgagccgagatggcgccactgcactccagcctggtgaaagagcagactctgtctcaaaaaaataaattaaaataaaataaaataaaattggagaagtttctcaccaaaattttggcgcacggattaattctgaagaaagaagaaagaatgcaatcttagtagcacaattagtaccttgaataaattggagtatcgtatttcttggactatctgagaatgcagaggcaatttaaggatccctaattctaaggagaagaaacctttagtgtattccttcctgttgctttagtttgaattgagttttatatgtattttttaatctttctattttgattgttgtctaaagagtgtgaaagtgaattttgatatttttattttgcctggcgatgaatgccttctgctctggatatttaaaaattatatacacatatatgtgtgtgtgtgtgtgtgtgtgtgtgtgtatatatatatatatatatatatatatatataaaatttttctgagaacttttattaattcagcgtatctttgctaaacacctgccatgtgtcgtggtgttaggtctggtgatacaaacatgttcagagagatgattttctttcttttttggggggtgggtaagggaaagaaggcttatacaacagaatcttatttctcacagttctggaggctgggattccaagatcagggcctggtgagggcccctcttcctggtttgcagatggcttccttctctctgtgtcctaacatagcaaagagagacagagctctgatgacacttcctcttgttataagggaactaattccatcataagggccccaagaaaggtgcttttcaaaaacagttcagtaaaagtactgggttgtataatcactttaatgagtatcaatccatatttttaagatagaaatgaatgaaattagtaaaatagaatagaaataaggagtccatcacttttaagtaagtttcaatattgttcgtaaaactttggttcggtggtttgtgtgtgtgtgtatttgtgtgtgtgtgtgtgtgtgtctgtcggtgtggaaatactggatcactttgtaacatatattcaaaagcctctgtattttaacattatttctgcctttgagaggttcacattccagaggtgaagacatacatcctaagacaaaattataatagcattatgagaattacagtagagagctggacagggtctagcaaaaacagaagactaggctaaaccttccaaagaggccaggaaactcacctagaacggtggattttaaccttgcttatgcactgggggagattttaaaaatatctctgcccacaatagataccaactgaattgagcatagcatgtcctacccatgaatctattgtccagtgagaacctctgtttagagaaagtcaccttagaagaattgttaggagttatttaggttcatggggttgaaaagagcattcgtgatagaggaaacaccatatccaaaggcttagtcagtgtggtagtgtgagaatctgaaggaacttggctggggtatggttgctacaagaaatgaaattagatcaactggggctaaattatgtggaaagacagcatgatgtagcagctagagtatggaccttgtaagcaggaagaccccttatttagcacttactagcttattgtctgacctctgagtcccaattttactcttctatacaatgagtacatcacaggattttatcaggtttaaatgataagatatatgtaaaatgcataccagagaggcagactattggactcgaagggctcagtaagtgtaagctggctctctctgccccttgccacctatttttcagactctggacttttatcactttaagtcatagcctagttctaagcaaggaaatggactaatcagacatgtttttaaaagatcattctggtagtggttaggagaatgaattggaaagatatgagacccatgcagggacaacagttaggacattatttctgtaataagccaagcaagaattgatgatcaaagtggtgaggttgaacaaacaaaacagatacgtgagctatttggagataaaatcaacactgtcatatgttttgtgggaggtggaggtgagcagaaaatgtgaggtaaaatgagaaatcagtgcctgcttaccacttggcatgattgactgaaggtagtgtcttcactcaatcatgagttgcagaattcaagatggcaaacagttgtgaggagcaaagtcaagaacgtgtttgattttgaggtatctgtaagtgaaaaatcagaggtgaaaaccttacctctcttgaagcagttgtgaatgtaaatctaaggtttggaaaaagatctgggttaaagatttaaaattgaaggacatcaacatggaagccatagaaataaattatattacacacaaatttatgtcgttatttgaatttctccatggtccactcagaaatatatctaaatgtcaccaaaatgttacttactgtagtacagaattggtattaagtgatactattgtccatgttattcaaaaagacagttatagggaccctcttaataaactaattgtgaaaaaggcaaagaattagcaaagctttggcataaaattcatatcatgggccaggcgtggtggctcatgcatataatcccagcactttgggaggctgaggtgggcagatcacctgaggtcgggagttcgagaccagcctgaccaacatggcgaaaccccgtctctactaaaaatacaaaaattagccaggtgtggtggcacacgcctgtaatcccaactactcgggaggcagaggcaggagaatcgcttgaacgtaggaggcagaggatgcagtgagctgagatcgtgccattgcactccagcctgggtgacacagtgagactccatctcaaaaaaaaaaaaaaaaaattatgtcatggaaaaagtaaaagtctttgcataatgtatccaagatcatgaaaaactcttttcaataagataattagttccttttcttatataaacatggaaattttcatttttccttttattctcatattgatactataaaaaccccatcctcattcacaatactactgtctctaccctcgatagataccagttcaattgaacgtagcatgttctacccatgaatctattgttcagtgagaacctctgactataatgctcaggaatactcaagactcacatgattgtcttcttgctatatttagttactttattattttccattttgggaccctgaattcctgtagatctcagagaaaatccgaaatgaaataatgaaaataattaaaagtttagaaaagggagtcaatggggacaaatgttcaggactggtcttttatctcctgcaggaagaaagactgaatgcagaaaattagaatccatttttcatccagtcaccccaatttaatgcaatatgagtttagctatttgattttaagtgttgtaccgttttggaccatgttaccatggtaacatgaaccatgtctcattcatacgtaaacatgttaattgtattaaaacctttaaaacctacttctggatgttgccattacattaaacaattatctagaatgatacaaagtaatgactaaattgaataactttgtaaattaactattggattttgtaattttatatctataaaccaaaagaaaagcccacattggtaagaagacactgtgcatactgaaaagtcaattttgttagcctccaataaccattgtgttttattcctcgcagagcttttgtgaggatcttataagggaataaatatgaaagcactttgaaaaagctttcaagtgaaaggtccttattaattttatgaattaccattaaacaaaagtcaaactgaagatgtaaatctaataggatgctcttaaaagtcaatggatcaaagttatattaattaataaagaataataactaaatattttatgtttcataattggcaaagtatctttactgtcattttctaatttgatccttagtgaaaacctgtgatgttggtactcctattatttccattttcatttgagaagaataaaattggagaggttaagtaatttatctattgctacttgttaaaataactactaaattttattactcccagttaggagggcaattatataaactaaaagcttgtcacaataaatgtttacttttctgggattaaagtcatcatgtatttttcaattattaaggggggtaataataataatagctacctttttaaaatagttactatgtgccaaggtgtgtactaagtgctttgcttgcatgatgtaataccatcgtatatttagtacagaggaaaaactgagaggctgggtaacttctactaaggtaacacacaagtactggttgagtatcccttatccaaaacacttgggaccacaagtgttatggatatcaatttttttctgattctttttttggatttcagattttttcagattttggattacttgctttataattatgggttaagcatcccaaaccccaaaattcaaaattggaaatactccaatgagcatttactttgagaatcatgtcggcgctcaaaaattttcagcttttagagttttttggattttggattttcagatttgggatgctcaacccgaatatatagaaaagtcagcatttgaacctaagtttgactttctgatcttctaccaactctactgtcctacccattactctacattgactcagcattacagggaaagacccaagatcaccaaaagcaagcttcaaatcactcatctaatagaaattagtggaaatatttctacttcctaaacatccatctttcctttacattttaaagtcaagtttctacatctgcctcccaactgaaacacttctctatgaaatcaccataactaccaaatgcaaatatttttatcaagtcctcattgccctagaaatctactcatattttgttattactgctcactacagcctactgaaaaatgtctcaccttttgacttgccagggtgatatattatactaattgtctccttgtctctctaagcactcattccttcctctttctttcttctttttttttttttcacttttattttaagctctaggggcacatgtgcaggtttgttacatgggtaaattgcatgtcatgggagtttggtgaacagattattttgtcacccagataataagcatggtacctgataggtagtttctcagtcttcaccatcctcccaccctccaccctagagtagatcctggtttctgttgttcccttctttgtgttcatatgtactcagtgtttagctccacttataagtgagaatatatggtatttggttttctgttcctatgttatttcacctaggataatggcctccagctccatccatgttgctgcaaagaacataatctcattcttttttctggctgcacagtattccctggtgtatatgtaccacattttctatatctgatctaccattgatgggcatttaggttgattccatgtctttggtattgggaatagtgcagcaatgaacatacagctgcatgtgtctttatggtagaatgatttatattcctttgggtatatacccagtaatggcattgctgggttgaacggtagttcagttttgagttcttagaggtatttccaaactgctttccacagtggctgaactaatttacattcccaccaacagggtataagcattcccctttcttcacaacctcaccagcatctggtattttttgactttttttttttttttttttttttttttgagacgaagtctcgctcttgtcccccaggctggagtgcaatggcgcaatcttggctcactgcaacctccacctcccgggttcaagtgattctcctgcctcagcctcccaagtagctgggattagaggcgccttccaccatgcctggctaattttttatttttagtacagacagggtttcaccaggttggccaggctggtcgcaaactcctgacctcaggtgatgcgcccgccccggcctcccaaaacgctgagattacaggtgtgagccaccacaccaagcccacagtatcaattctatgcattcttttctgatttcattaatctcattatcttcatttgatatttagtcaatagttactgtcagttatgtgttagttattatactagaaacagtcttttctccatctcctttaatccaatgatttgaacatttttattcctttccaatgtctgtcccacatttcttactgtatgtaggacatttcttactcaaatgtctcacaaatgacataaattcagtatgacccaaataggccattttttataccaagtcttatttcctatcctgctgttcatcccggtaccatcttttcagtcagagagttcagatcatatagtcatttctaaatctcccacttacttgcctcactttcaagttcatttttaaggtctgtagattctgcctccctaattctttatgaccattcctttctcactagccccttacctccactctcattcacactcttactattttttaccctcctccactcattcctgcccaccagtggctccaatccaacttgcagatttccatttaaattaagcttcctaaaacatagcttaggttgtaactacaatgcaaattccatgagagcaaagatttcatctgctttattcacttgtatatatccattgtccaagactgtgtgtgtcacatgaaaagtgttcaataagtatttgtcagtgaacgaaaataatatatgactcccctcttcaaacaccttttttgacttcaaagcccttcagaatattctacagactccttcacctggctctccacaattgcccctgagtctcgtttccaatcttatttcttattttacctctcaatgcaccttcaactcctactaaaatgaacagctagccagcttacttctgtgtctttcgatgatcttgttttttgtcttgagattcctttttttcatctaagcttacccaaacattacctacttttcaaggaaagccattttcgaatcttccctttttccctgagcccccaagctggaagacatcttgtctccatctcaattcctataggcatttctctgcactttaaatgacgtttagtacttctgacattgcattagagagaggctggggtggatagtgtttcatagtgtgaactttgaagcccgactgcctgagtttaaatcgtgattctggggcttactgaccatagacgcatttctgaattgctctcagattatggagcataaatcaaaagtaatgacagctacctcttcaggttgttgtgagggtgatgcgaattaatgtactgaagtgcatggaacagtttctggcacacggtaagcacccaataaacatagctaatattatgttattactattttcaggcttatttttatgtatacatatagtatgtaattttatgtcaatatgtataaatagactttggtattgtttatttcactatcaccttgagagcacaattctcatttgatttgtgtgagaaactacttagaaagaaatagacgtgtgaatgaaactatgcttgaaatattggttactgtgagtgttgaaaatccattttgtttaaagaaagcttcaattgttaatcttccataaattttagttcttaagcgttcatattgactcgttttggaaaagctctttaaagtcttgggatataaacaaggctgaataccctcattcatgataacaaacatattatactgaaaattgtaagagagatattttatctttcataatgccctccttgggaaaatacattgacttggcccttctctttcaatcagacaccaaagttgagattgcctgaaacacagtttggtaaaaggagtttctttttcccaaacatcctgagtaacacaggaaatcacaccaatgactgatagataacgttaataaaattaataaagttgttttaaatgcataccatggggcagtggcaatgaaaacattgagaaggctgggactatttgccaactttctttgatctccattagaacctggacaagatccacataatttcagaacttcttctccaaacaagaattgaaaaggtcaggaaaagtttgaccacagaaaaatgtcaaagaattttgtgtcactttctcctcctcccttcctctaaccttgaataattttttagggttattggtctttgggagcagactttctagaccaaaacaaaaaaaatgatattcctctatgtgataggtaacaatcactacccatcctactggaaaattctcaaagtgtaaattgaggggataaaaaaagaatcttaagtcctttaaattatttttaagatgaactacattagtgcctctcttgtgcctttcataattctgataataaaacattccaggtattagtcaaagattaatggtattgaaaataatttaggttatcagcatgtgattttcattccacatgaggtccttttgcagtttacatggttttctaaattatattaaaataaaatgtcagaaagttcacatttttttcatgtttaacagcatcaatctttaaagaaaagttattgcacaaaggtctgtgcataaatcagccattctccgaagaggtaaaagaagtcattacgcctggttatgagagagagtttcatgaatgtaagagacataaatcatttcccactggagatcatattagtctagatggaagaatgtctgtttcttgatagtgagaaagcaacaaattacttttgtttgctcctgagtctgtggttgtccttgagaggtctgttagcatgttgactattgactattcaatattagcattataataacttacaatgatctgagtcacataaatataatctttcagttctctaaagattttactttttcctctctaatatctattcacctccaacacctttgcaaatatattattctctgggagttacaaagaaagttattctctgcaggaagcagcatttcagttgctctcaggagccaaccacatttcacctcaattctttgctcccaattcaacaattcaatattggattaaattcaaggctgtgaccccaaatagaatgagacctggatatttatgaaccacttgaccaggcattcttcccatgatttactccataaatcctttttagtttttgcagtagctttacaaatatttggaaaatggctgtgcaatgcagttttaaaaagtgcaatgagtagaggtagcttcttcacctggtatggtaaattgttgattctcttttggagtggaaaacaagtgttcttatttggatgcaaccattgcattgattagacaaccctaaattcatctttcatccatgacctgaaagaaattttgaaattcatgcaatatatacccgtagtggaaaatgtactttttgaatggattcctgaatgtgacttttaagaagagctattaagaagtgggatcttctacagaacagtaaacaggcatgaaaatatacaagttgataagatatggaactaccccaaaagaggaattaatagtggtggggcttggggcaggaggacagagagacctagccaaggaaggaagggctatattataatagagtacaaagtcctttagtcatccaagagaaggggcaccttctgcatcccttatgagtaagatcagagaaggtattctagttaacttttgctacataacaagccagcccaaaacttcatggcttcagtaaaaattacttgttttgttcatgaatctacagtttgctcaaggttcaatggggcttgcttatccctgtttcagttgatatcagttggggtagattgcctgatgctggaggattcacttccaagagggctcactcacatgcctggaaaataggtgctgactgtcagtttttcttcatgtggacctctccatggagcagtttgggctttttcacagtgtaagagttgggtcccaagagcaattatcctaagggacaagaaattaaagctgcaagcttctcaaggcctgccctaaaagcaagaatggttttgcttctcccatattctatttgtcaatcagtgacagagctctgattcaaggggatgagaacataaactccacctttccatggagaagtatcaaaaagttttgatgccatttaattaaagctgccatacaaagtttcttataaatgacactgagctgaatgaatactaaacagcaagtagtcattatcccagtcaagagaagttatctttgctcagaataccctttctctccttgtctacctggaaaattcaactcttggccaaagccctacctcttctcgaaagcattaccaggccttgcctctaagtgtacaattggagatacaccagtatactgatgtttttaaaactttaaacttttttctacaataaaacataaattaaataacttcccttctgacttaaaagctgcaaaatgctcatgacagtaactatataaattaaaattaaatcttaagcacgataaatacctctcgaatagcaacatagatgcttacttctttatttcacttctttatttgcttttctttgtctatagtttgccccaaaggtattttaataatatcgggttccatgtataccagtgtgtaccaattaatatttagaatatacctgttaataacctcatttgcatagccctactaatctgagcacagcgcagccttaagaaagtcttagtttttctcagtttagttcatctctcttctcttctcctcctgtctctcttatttcctatttctttttcttttcaagtgactttcaactaagtagaaaatgcatttcacatcactatgccggcctccaggctctgtctatttcattcacccaggaatgccctttctgaatgctttctctcatttagcagctatctattgaagttggacaaatgatagaaattcatttcttaaagagccagaacatcatcttgaacaagaagttaaaagaattcagcaaatcaaaagatgagctaatatgggtgaatcttagaggcattatgctaagtgaaataaaccagacacaaaatgaaaaatattgtatgattccactggtatgagctacctacaacagtcaaatttatacagacgtaaagttgaaggatgttaccaggagctggaggaagaagagaatgagggcttattgtttaatgagtacctgagtttcagtttgggatgatgaaaacattctagagatggatagtggtgatggttcaacgataataataatataatattaatgtacttaatagtactcaactgtatacttaaaaatggtcaagaaaatggtaccccgttatcctgatgtgattattacacattgtaggcctatatcaaaatatctcatgtaccccgtaaatatatgcacctactatgtacccataaaaaaaatttaaaggctaaatggccaggcattgtgggtcacttctgtaatcccagaactgtgggaggctaaagcaggaggatcacttgagctcaggagttcaagaccagcctgggcaacatggcaaggccccatctctacaaagaattcaaaaattaactgggtgtgggagctcatgcttgtagtcccagacacactggaggctgaggcaggaggattccttgaacccaggaactggaggaagcagtgaatgacactgtaccccagcatggtcaagatcccaaatcaaaaagaaatgattaaaatgatcaattttatgttgtgtatattttgccacaatacaaaaatggggaaaagcctattcgcttttaagtatccttaaaaaggcacagcttcttcagctaacagactctaaaactttttttaatagaagtattaaggtatttagagagtgcaaaatatcttattttaagtcaagaagttagggtcctgttcctaaacactagcctctgtaatcctggggaagtcagtgctgttggagatctcaggttgatcttctgaaaaatgatggatctaggtaaaagatatgtttctccaggtttacataccacggacaccatctttacttggaaactttattaaaaatgcattgtgtcagaagctctctggggatgggtcgtggaatctgcatatgtaaagagcccctaggtagttcttgtgcccacttaaatttgagaaccactagaccagatgttttgcttatggccctttcagctctgaaatttgaaaaaaaaaaaaatgattctgcaagacagagtctctgtgcttttgcaggataaagaaatgaagaaaataatacttcctgcttgtgttggagcatttttttcatttggtatccccatctccagtggctagccaatcaagaatagtattgtttattcttcccactgttttgaagatacaaaaggaaaagctaagccagatgacacctaaaggcttccattaccattttcatgtttttccctttgcataaaaactgtccatgcctccatcagagccatgatcactagtacaatgttacactctaatgactcatgacattaaattatatcttagcctaatatgaccaaattacaatatcagaataaaaatttcttttttcaggttgaatcccataacttaatccaattataatactggctgaatttttcacaattatgtctcagtcttgatttagggaatcttctctttatcataaaaatgcattttgttaaacatgtttcattataatcaatttctcaaaagtaaagttaatcaagagaaggaaaaaaggttttgttttgatttgatttggaatgtgtatgtgtgtttactgtattgaaatagattctgtctgaaagactgtatataagataaaaagtacagaagagtagtcagagagttattacccacccctgactgatggtgaatagattatctaagtatcccgtaaaaggcacaactccttcaggtatattttacaaattaattagtaactttctagccaaatttgtgtcttaaagacaccagctagaacttggttagttctagcaaagaagattattttattctgaaacaggtttttgttgtcgttttacttatttgaacttttttcttgaatatgtatttctttgcacataaaatatattgacttatgaatgtgattaaaatggaaaataattagttgattttagagagacagagagaggagaagagaagtgtgaaggagagagggaggatagaaaggagagagggagaacaggaaggacagagggagaatgggaaggagagggagagagagagacagagagagaggaatggagtgggtaataagcaagagaaaaatgccaatcatatgctttgctagtgtgtaaagtctgataacccaagggagagaggactactctggcctagtgaaacaaaggaaagagaaatatggtagaatattctcctggtgcttcaccaaatgtgacaccagaagtctgacagaagtcatgtcagcatttgagctccataaaactcaggctatcgacctaccatgtgagagtctcaaaatgagtttaggtaggggcagaggagttgaaatccagtaacatatgcaacagtgatcacaccaggattgcacatagaaagcaaattagtcctctaatagagacgccaatttgaaattcaccctctgagcaggtttttaagcacactcttcttttacttttctatttacaaaaatggaacaccaccagaaaaacaagaatttgaaagacgagatgagaaaagtaagttgtaattggaaacagacagaatgtgtacacaaacacacacacacacgcacacacacgtgcatgcacaggtgatgagagagtagtttgcctacatggtgtatctgactaagaagactttttgctctggttgtcttacaggaagtgactaaatctcatgatgtgaaatattttcttgcatattgtattggaaaagaaaataattttcccaaactccttaggggcagtgttgtcttataattcccatatagtatatgctcttcaagtaagtaactccagagttgagtaagacaagactcgtgactcagatggcatgctctgctccctagactagacattgcatcagtctgcctatactcacatccgctgttaaaggattgcctccagtaaaatatgtcttttaattccttatacaagaatctggaaaaaaaaagtaagattctctatttcttaaatttagcagcaggttaatcactgataacaataaaaatacataacaatcatctagcacgggtaaatattgtggcaaaaattacaccctgaagaattcagtcaaagatataagtaagtacacatcattgtcatgttccacaatatatcatctgctttaaagaaactgttatgtagctgtagtagatttaatcattaatcccatttcttctccaccttctgcaatcacaaccttaacaatgcctccttatgagtggaatgtacttcccaacccctagtcttaggggttggccatgtgatttgctttagcaaatggtaaatgagcaggagtgagaggtgacagttttcagcctaggccttaagagatctatacattcctgtttgtgcttctgctatcattctgagaacacgtccatctaggctgctggtctcaggaaaacgataaaagacatgaacagcagggctgcactagccattcacatccaggaaaagaaatgattgttgcataaagccattgagctttattctacattactgtgacaatagctaattgaaatagtaaatatactttggtttttcctaaatgcatattgaaaattaataatattagccatctgtatgataaaaatataaagcctatgttttattttttaatggttcactgccctaaataaatttccaaaaagtagatgttcccttgtctagtgatgtcattatattttatttatacatcataaacacactgtttatttctgctcatttttttgtaagtaacatgtgttaccgccaatcttgagatgatacacacacttctgtactaaattttggaaaacatattagctacccactccttatatcaaaatattgcctaataatgtgttttgttttaatccttcatgaatttccaggagaactgaactgatacttgggtttgtgagatatatgaaaatagtgaacatgaacttctggtttaacccttgtgatgataatggaatcatagctctgttaattactcttgtggtttgtcttcctagagataatcatgtacaaaattcctttccaatttgttatataatattagaaatacttccaaaattggcatggatttattgttatcatttgttggcacaatcattaaaacgaaacccataaagctagataattaaatgtttacaaagctatagtactcaaaacaaaaacactgtgaaaagagattttttaaataatagtttttgcatgccttttgaataattggattattctgaatttcttcatgtttagtccctgaatctaagtcataccgtctacataaaaatagatgtcagctgaagaaaaccaggcaatggatttgtcttgacgacaatctttttatatgttcagacttcatttaacattagacttgtctgtatttgaaattggtatttctttacatttctgaatttagggaaatggcacaagagaataacattaatttcctctgcattttggcctaatcaaatttgagcctttcaagagacacagccaagtcaattcaaagagacatatgaaaagactactgttaatgtatctttaaaatgaattagcggcatgaactgttgctaggtgagttaggtatagttgtagtttttagtaaccctaagagaagatgcagtgcattctaaaatgtcacaaggagtttgattgctcaaaattctgggagattggctctctgcaaggcttcttgatgtcattgttcctagaggaatgttgttccagtacctatagcgattgcagccataactatttatgtgtcattgtagccattgttattactacatgcttcacatacctctactgaggtctaaagaattagtggacttcatattctggagagaacacttgaagaaccaaacagaagtttgatgtgaatctgcatatccaccattattgttcataggttctcaggattagttgagtgatgccttaaagaaagaaagtcagatgataggtcttcctgctgcccgcaccacatcatgagtgttattcctatagaggaggagtaaagagtgggaagaaaatgaaatctgtcaatactgtgaatatataaataataaaagtagcagtaggactgattaattctgaatcatctttatgaaatgactggagccgtgaaaatgctcagtctgcacagctgattgagaaatgtatgcaatctgttgatcggaatttatttgtgaatgctctcttccagagatttatataccagagttcttaaaacgaattttgtccccatgaaaagaaaactacagatctgtaagactgcaatttaaaatggaagaaaacatgttcccacttgaagaacaactttcaaacaaacaactgatacaaaaaagtcaaaagctgttttgttttatataatagtttcagaatacttccagtcaatatataccttggtttggtgaaaaaataaaaagctaaatccttagatcattaactagaaatttttgtaaaataaataaaagccgtgggttttagtgcagtgatcccatgaagaggaatatattcaccattggtctcttaatctcagatagaatgtacatgttactttattttataacgaaagcaactgtgttgtgatattatgtataatattataacaggagaagtcctcttagctaactcagtaatcaataacattgtacgttgtgtgttattgtaaccaaaaactatgacagaaccccatttcataagatcagtttatccacctatatgatttatatttgaatattcatttcagtacttatgttgcttaaacaaagctactgtattagtccattttcatactgctataaagaactgcccgagactgggtaatttctaaaggaaagaggtttaattgactcacagttccacatggctgggtaggcctcaggaaacttacaatcatggcagaaggtgaaggggaagcaagcatcttcttcacaaggccgcaggaaggagaagcgcccagcgaagtaggaagagccccttataaaaccatcagatcccgctatcatgagaacagcatgggagaaactgcccttatgattccattacctccacctggtctctcccttgacacgtggggattatggaggttatggggattacaatttaagatgagattgtggggtggggacacagccaagccataccaaaaactctgttttttgtttttgtttaatggaaatgatttagaactttattttctgatgtttctttttcataaaaccacgacaccaaaatctacttttcactgctccattcaactagtagagaatatctaatctcttctcaagtatttctttctcaattatggtggttttagctaagaacagcttatggcatgcttttctaaataatattagaacacataaattatctgtacctggtattaccacattcattgctcattttaagatctcaattgatacattcaattcatatatatttaaaattgattcatttagagcaagagatacaggcattttaatgtattacactgctactaaagcttagcaaattattcttttttgtgcccacaaattatcatccattcatgtcctaaaaataaaattgaatttattatactttcccatttatccaaaaaaaaggttttttttaacaattgatgcagatacacattttcaagctaaaaatatgtgtgaaagtggcctctttctcatagtatttattttaggagtctagcaataatttttcttaggttatcagcacatgtcttagcctgaattatttgaattcagtctgtgtcttcaagttcagatggttatgtgatcttgttaagatctcaaagtagtgggaatgatggagtatacaacaacctcattgttttttatggcaactgtcatttactgaaggacataaggctagcagaacatggtcagagaaggaatcaaagtttggtcagccaactctgctccacagctacaagctgctagacaggcataaatttttccaaacctacacaaagggacttagggcccttggctgagagcgacattctaaccacttccttatttatggctggtggggtttgtacattttctcatttctgtataacatttcttgactgtaataagcaatgtattcattctgctttaccactttcactaaccttaacctcaatatatactcaattaagcaattgaaaacagcagttttaatcttttgacataaatgatttcctccgaagcaaaatgctggaaatcccctcaaatgcaccttttattgatgaatacctataagcaccacctacagtcgctggaggctgacaggaaccaaacttgatgataaccactgagctgagaattttcaactcactctttttccctgtatggttcttctagctgcattatttcccactatttaaagctacagctggtgaactattcaaatatttaaactttggagaagaaaatatcaacttatcacaaccctctttttatattctaaattcatatacctgtttggtacttaaaggaaaaatatgctgaggaacaggctggtcataagactgtatagaacgtgcatcttccatcctattgaggtgactcctagacaatgggaaaaatgccttcactcgacttgctcattaaatgtgaccgtagctgctaatcttttggcgctgtctcgaactttaattagatgtgctcttctcttgaaggttggaactacagtatccagagaccatagaatcacagagttgaaaacaaaatcttggaaatcattgaatccacttatcagatgagaaaaaaaaaataagcccatggagatagccattttaaaacatatcattctatttagcctccaatgtaaaacaatgagttactatgtttcaataatgttgatgttaagaaattatttgatagcttcctcacttggtctcctatattcctccaaggttactagttaggaagactgtcattcaaatttggagactacataagaagcagaaaaagcatataaagaggcacatgaaattggaacttttctggtaaaatcttctttcttaaactctcctcaaataagctgttggtggcaggaggtgaaagacagcctccaccctttagcacagtccgtacttgtcagcatttcccaggaagggtgatgtctggaaatgatagagattgtggaagcacattgcattatgggtcaagaatgcgaaggtcaaggagtggagtcttcctttacgaagtagtgttaactgcttggcgtggcattgttgtaaacagaagccaccaggaaggatcatccttaggagggaacctgtagatatgactgaaaacaagagagatccagttttaccactctggaaacataggtaatagaaagcccaaaaggtaccttatcacttgtttgttcctttctgtacaaaaggacttaaatcctttctgagcaagaaagatatttgagaatccaattttgttttaaacttgagcttagcattttggaactattccaaagaccacagaattcacagtcattagcataccacagcagactcttttcaaatattgcaaaccagaacagtctgcttgaaaacctggaaatacgacctagtgggttcaacttgactttttttatttctaacccttacccctaggcaattattgataactcattctggtacctggtatgtatatggactttgttagaagaatttgacaactttctaatcatctgttttttttcttttgcttgatagacatacatttagtagaactttactggattgtattgattataaaccacatttcagttcatatcagtccattttgctgcacaataaacaaccaaaaaaatttaattcagtggctaataacaacaatattgatttattcatggagctgcagtttggtagggtttggccaatcatggctggaaatggtttagctatgcttatctctaggccgtcggttctgttcgggtctataccacatattttcttctgagactcaagctgaagggacatcagctactcggggtatgacagagtagcacaaggcaatgacagaagcacaaacaacacttttcaaaatctctcctcttgtcacatttgtttatagcccattagacaaaacatgtcttgtggccaagcccaaagtcaaggggtaggaaaatactttccacctatgtgaggccatggctggagcgtgaatgtatgatactactagggatgtgaaaggattgaggccaataattcaatcttctattggagacaagctcaacgagttagttaaaatggaaggctaatatttactaactttgcaacccaaggaagagaaagcaggatctctctgacgatgacggaatttcataccctcatctttgaagttatactaaagcttaggaacaaccgtcagataggactgaattgctcccccttccagattcagcatgtgaagtatgcagcatcttattatagcagtagccaaaacagccgttttcttcaatttgggaatacaatgtaggtgtgttaattttcaattaagagttctaaacttattatctgcttggtagctcttccatgtgacagtcattccatctgactcttcatgttggcttttgaactaaattttaaaggaaccgccaaaatttaagggccatgtactttttataacctgtttgtggtctgggtaagaaaataaaaattatacaactgttctttttgaccagccacaagcatgtaatgaaaatgactgttttggctagcagatgtattagaagctttcaaggtgtttaaaaaaaaaaaaaaaaactggagaaaggagccagtgaattgacctcaaacaaaacaagaacaaataaacaaaacacttgtctgcacttccaaggaagggtgatatctagaaaagatagagatgatggaagcaccttgcattatgggtcacaaacgtgaaggtcaaggggtggcgtcttcctttatgaagtagtattaactgcttggcagggcattgttgtaaaaagaatccaccagaagtgaaacaagcagcactaaaagttaaaagatttatgtgtaaacctcatctaaggcaacagaagccatttctataaaatagtataggaccttttattatatatggtcctagagtatattaaaataagtctgtttgggtccatttgcagctcatttgaagatttttataggaaaaacatcctcaaaaatatcatactacagtgccttgatgcttttttctttttataaggtactgccagcccaaatagtaagaaaccgatatgatttttgtccatgtgaggtgtttaattgcttcccaaaatatggttattgtgtagatgtcactaacgaaatatataaagagcagtatttgggaaaatttattttaataccacctttttccttttttaccctaaaagtatttatttttttcgtagcatacactctgtgtctcagtatcattgtttttcataaaaacataaattcttaacagaaaatttcctgcaagctcccctaagcttgaagagacaaaggagatttgtaatgtagctcagccccaatcagggtaaaagaatgcagggctgactttatacttataactcagaaaaaggttatgcttcccgtctcttcacagagctagtctcttaattgattccgaactaggaacatgtacaagtggcccacgatctggaacagactggcggataatggaatattgagaccttgtctatggtcagccatattaacactggataagtctgataacactgtgattacatatgtatcaatatagtatgctgttaatatattaaaaacttatttacaacatgattattggacaactgttacagtacagccacatcaatcctatatcaagttagaccatgtcaactggttttgtgttgagacacctgtgtatggacatagtctgaacttttcatagtttgtgctaaatgatagcaatcaacatcggtatggcacttacagtttactgataactttcatgcccattaacatagtaccgcaataactctgtgaagtgctgaatttgtgtcctgtttcatgattgtatttgtgttgatatctcagtcagtcagagtcccaacaagaaacagatggcacattcagattagggtaagttgaggagtctttatttacaaggcactacatactcaggattgggcagggtgtagggaaatctcacaagatagcacaagactctaggactagcagcagcagagctgtcacctctcctagacctgaagccgttgttggggagagaggtttctcagagcccagaaaaaaagaaaaaaaaaaaaaacatcatgcagattttaatgccttgggaggagcagtggctttctcttaaggacagaatttgcctcgaaatgatactcagggaaaaagagatgaagggaatcaatactctgacccaagactctcccttctctgcagtggtttgctagtcctctccttggtcaaacccaaacagaaaaccatagggcataggagtctaatgatgtaatccaagtcagccccctggaaggtggaaaaagaagggaaaatggatctggatctggagggataccaaaaaaaaaaaaaaaaaaaaaaaaccatagttggcatgcttgtttattgatattttcttgcatgatataagaatccagataaatatagtaagaggtctattttactaacaattttaggcacctaataataatactccttctttgaatgtataacctctagaattggttcagaaatgtaactgtgccgttacaatttctattagtattcaacagtagattcatatccattcatctatgactggagtatctgccatttgctggttagttactgtgtaaggtactttgtaaggtatagaaatacacttggggtgcgatggctcatgcctgtaatcccaaggatttgggaagctgaggcaggcagatcacttgagtccaggagtttgagatcagcctgggcaacatggtgaaaccccatctctacaaaaaatgcaaaaagagtacctgcgcatggtggcatgtgcctgtagtcccagctactcgggagcctgaggtagaaggatcacgtgaacccaggaagtcgaggctgcagtgagccataatggcacaactgcactccagcctggatgacagagtgagaccctatcaaaaaaaaataagaaataaatttgagctcagtgacctacattctagtgcagaaaaaaatgaccatagttgattatgagattttaaagcaataaaccacatgagacatactaatgagctcataagatcattcagaaattgtttattatgaacacatagtactttcagtgtggcattaaacagagatcactgtccttaaacaagttaaaagcagaatcaaatcatctgcaaattaacacaccactaaactttaagcttcttgagtgattctgtaatttttaaaatgtcttcagcatttcagtgtcaagatagtgcaaactcagtaaaagcttgtggaattgcattaaacaaaaccaaaataaatagattttattaaaactatatacaattgtctttctaatcatatcctctccatgaatagggaagaaataattttaggaatttaaatatcttctatcttaatagttcctcttatttccctcttaagcaatgttcactccttcaaaaatatttattgagcatctaatatgtacttaacactgtgccaggtgctgtgaagaatgccaaggaaatagaatgaacttctaattctttggagttccaattaaataacctaaagttaaattggtttcggagagaacattatgccttcgagactgtaggcttctcttgattagaaagtcttaaacattttaagtaactaaacagattaaggagaattcaaggatgcctctcactagtaaatttggattagtctggcaaacttcagaccttaaatgcaagatttttaataattaaaagaagagagaaaatgataattacatttctagagtctatgtttaccattcagccttcttaatcatttcctaagtatatctggtgatcaggattttataactccagaaaatctttctatacatcgcataaatctcttcttttaaaaagctcttcaattttgtattttgttaaaacttaaaagcctccatgaaaaatgagacaaaagtcagtgagaggctgtagcaataaaaatcagatgtgattttcttttgaataacatctgtttttacagtcctttcatgttaaactttataagaatttattataaacagctttattgacagttcaatcctatttctaaaaggatttattttcccccaatggtaagagttttcttttcttaaacctaactagttgcagatatttcagatactacatttctcattgtgtaaggtaaagtttctgaccacctgaatatgacttgtagctcctgagaacaatttgtttagtaccgatatcatgcagtgacattggtacaaaggaattttctttatttcactgtactgttttcagttttattctatagttgttaaataagaccattaaatatttttattagtcttatttcctgtttaactaggtgggtttttgatctctgttcagtaaagcattgtgctcttcagagcaagcaattgaaaagcaaatagtgagtatttctactgtaaaagtttaacattaaaagatatacacacagccaggcaaggtggctcacgactgtaatcccagcaatttgggaggctaaggcaggagaatcgcttgagcccaggagttcgagaccagtctgggaaccatagcaagactccgtctctaccaaaaaaattttttaaaaaatagttggatgtggtggaacacctctgtaatcccagctactcaggacgctgaggcaggaggattgcttgagcctgggaggtcaaggctgcaaggctgcagggagctgtgactatgctactgtactccagtctaggtgacagaatgagaccctctctctctcaattaaaaaaaaaaaaacaagatacacacacatatatttgcgtaggtaactctaatttcatttcaagtatgttatgtaacaaccatttgtgtagtgcttgtaacagtcaatatgtaaatactgactcatcttctttgacaattctacctagatacttattagagtcccccttagtcattgaaaggaaggttaaaatcaaaagacgttgtttgccaaagtaatgaaagaaaacttataaacacaatgtatcatgtctggggctgaactaaaacccttctgatatgtggtattaacagatcatctttcatgacagtaccagttattagaaataaaatgattggagttattattaatactaacaatagtggtattcttaaaatgacttccttatttatcttcacctttatacattctactactgcttcaagacccatcttgaattcttcttccacagaacattctgcattaatttcagccaacattgatttctctttttaaaatttgtcttgcacagtgaattagaaaaccaggaattggaaaaccagaaaagcttattaagtaagaagcagagaggagagagtttcaacaaagggccattctaaagtggtctactgcggacaccatactgattatagttggtgattaaatcttatctttccaactgattataaactcctccagggcatactcttatattccacaagatgcttatctgggtgcagagcatgcatgcagttggtatttgctgatttatcaactaactaaatcttaacatattattattaacaatttaaaataaagttaaatgtatcactctccacccctcaaagccatttctgttctttgttttcatagcaccattattatttcctgcatagtattttttaaaaaccgtatttttaaaatttatatatttgtttatttgggtatacttcactagattgtaagcgtcacaaaagcagaactattataaccccagccactaacacaatgcctaacaaatagtaggttctcaatatttgttgaatgaatgacctacagatattacttcattatgaaagattttgctaagttgttttacatctattttatccaaaactaaagttcttgaggcaaagcctagaatatcttctatgttctcacaatgctctgaatcagtgcttctcttaatatgcatagcaattgcctggagagcttgttaaaacatagattacttagccccaaccccagagatgctgattcagtaggtcccaggtgatgctgctgctgtcagtctctggcgcacactttgagtagtagggctctaggatgttatatgtacagacacatgctgaatagtgggctatgtgcttacttgctggctaaataataaatgttctcactgagtcatagaactttgaaatttgcaaggacttttgctattatctagtctatggatagcaaataacctgataccgtgctatagtgcttgactgcatttaacctgcagaatcctcatgagcagcccagcaccatcactccaagtgaaactactctcttcttgaggttgtccaattctatcaattaaagatgaaaaccaggttctgagagttgaaatctctggacttcaaaggtccaacagcccaggtcttctcaattctcgttagtgtttcagcagctgaatacaaatttattaagctgtatcagagtagtatctgtcaaattggagtgtccataatatgcttaaacagagaactccattccaataacatgaactttccttatgctttattcatcatcgcttgaaattttgaattttgcccaaagaagtttataccagtacatgttaaattacatcatagccttctttgtataaatcttagagtagtttactgaagtacatcgcaaagttttgttgtttcttaggtgattttaattatgtatgtttactttcagtaatgcatcttttctccttcatcaatattatgttatgctagctgtaagtacaaaataattgagaacaaattatgacaaattgaaccaagccacaaaaaaaggagaaaccaaatacttttgtgatttgagcttttttcagtccttgaaactttaagaatatctgtctttattaacttttgctttttgctgatggtttctctcattttattatagcttatagcattgtaaattaatttaacatgaaaggataaaaacgttgcttttgaaatgtttctcattaaattatgaaaaaatattacactaaataaaagaaaggaatgcctctggtaccagcttctgtttgctcaattattgcagtacccaaagtgaattattacacagttaactcagaggcaatattattgtcattatattataaaatagatgagttgcaatcttcaaaaaaaaaaaacagcataggtcctttgaaagtgaaataccttttttccttgtgcttcatttaaatatatactgaccccagttttgtttttgtttttcctttttagagttcttgctaatgatgggcccaaagttatattaagaactgcaaagtaaatttcaaccaattactttattcaggggagtcattaaattgaggtacctctgaaattttggaaggaatgtactgccaattagccgaaagcactactcaatgtcctttctatggttataatctctctagtgtatttttaattgaagacaacctctatagaggaggtgagaagttgctatttattggtacttgttaggatggaatcaagggtgtggaagatattcatctatttctctctccagctcccccacacaaaaagaatggtgcttaatccatctgaagcatttggggagcgagggtaaagatgtaatatttaccatgagccgaaacagatcttcagaagtggaaaatggaagcatattgaagtccctcaactaaacagactttcttccatatggaattcaatgcattaatgttttcaaattctatagcttcaaattcttaatattttcaaattatgtgagcttatgtcaaaacatttaagtgagcttttaacaatgaggcaaatatttgaatcatttgtctacataacaaatactactataaagcatattaaatgttataaaaatcctaatatactaatgtaagctattataaagtacaaataattaaacaatatttatatgatcaatgttttataatacgataaacacattaaataattaaaaactcttccaccgtgcaaaaatgactaaataaattgttaatttctaaggctttttgagattactgtgaaagggggtatagtttcaggaaaggtgaaacttcccttcaatgtgtaaaccattaaagaacataataacctactgagtgtgggtctcaatgatatgccctggaaagtatgggcaactactccacacccaattttgtctttatatgataaggcacagcaaataattataatgcaatggataaatggtaaatcccaccaaagattaaccaatcagagcaggatgaaaattctgagtttggaaatctattggaagatttacagattagattaaagtgcccagtaaccaaactatcaaaattatatggcttcagttaattaatgatttccaaggtttttagtatactgtattacaaaacacattaagcatcttaagcattcaaacaacatttttttgatgattcagaaagcatcacaaattgttatatcagctgataataacttaggtacatatcaattaaacttgtattatagacacgcagaattcttcagaccagaagtcgaaagggcttctctagtttgtttatgctaagttgtttagagatgacataactctgagctaatttgtctattgcaatggttctcaaaatggggggcgggggatatttttacctccaccaagtggacatttagcaatatctggaggcatttttaattattattactggattggagatacaactgaagtctagtgggtagaggccagatatggtataaaatatcctacaatgcataggatagccctccacaaggaattatttaggccaaaatgtcagtagtataaaaattgagaaatgctagtctaatatagtgtttactcacctttcctgaaactatgtcccctttcacagtaatctcaaaaagctttagaaattaaaaaatcgtttagtcatttttgcatggtggaagagcttttaattatttagtgtgttttatcttatgaaatgttgataatataaatattgtttaattatttgaactttataagagcttatattagtatattaattaggattttatttaacatttaatatgctttacaataatattcattatatagacaaacgttttatttttttcactttaacaatgatttttaactctaattacataagaaaaagtatgagttaacaattttttaaattacatgcttggtttgagggccaaatacacatgaaaatgtggactaaaatttaaaatcaaataaaatctataaagtcgaggaaaaagctacttttatgacgaggcatggggaattcttcatagtttttgggttttatcagaagttagctattttttttctttttgctctgtaaacaatcagataagagaggctcaaatgacattttcaagtacatcttaacaaaatacactttgagcatcaattgagtaaagtttcattcttttgaaactttggttttcacaagatttcctgagagttttattttattggtgttctgtgggacttgggcatcataattcttacaaactactcagctcaatctaatgtgcagcgaagctctgggaacttttgttttgtctagtatccagttggaagattctatagctacagagcttgggtttaaaccccctccaagtctttaccagctacctttatgaccctggcaaattacttaaactgtgtgccaccattttctcctctgtaatacggaggcaataaaaatttccacttttagattttctatatgcggtttacaaattgacttactctgaagatcatctggagtaaaatctggagaaatatgatcccttataacttcttcaaccctttatatatttcaacatgagtaaccaatgctctaaatatggatataaattataagaataaaaaatctaggactattataatggtctaaactctcttcatagctaaaagtgttgagtaattaaaccagttgagcagctaaatcatgtacacacttctttgatccctcccacgatcatgtatttggcattgtaatgaaaagatatgtttattttcgagaatagacataactacctttaataatatgatcacccagaaatttttacaaacccctggaaaatttcatgaatatcaggctgtgctcataaaaccttagagatgagatcacaatagactgggtcaacatatagtaatgagcaggattaataaaacctcagatgggcatttacaaatgagtcaaaaccatgagtataattaaataattgtagcaaaaaaagagccttgggtaatcctttcagcaaacgtaatcgaagtgattgcatttagaagacaaatatttaatttggtgactagaaggtcttttattattccattatgtctttgtgtgtgtgtgtgtgtgagacacttttcaaggtcaatttttacttataaattgtctctaattaaaaattgacttggttattaaatcattgaaaattggccatcatcaaattcctcattaaaatatttctatgtgccatatatatatatatatatatatagaatatatatgtagaatatatgtatacatttatttttactttttttttactgtgcctactagagaaatttaaactacatatatgtagaatatatgtatgttttaactagacatactgttaagtacactatacctaatatttggcaatattaataccatctcattgagaaacctggaatatatgcacattttggatgtctattatatgttgggcactggactagtcattgataatacagagattagtaagactcaggttgacttcagccatgttgtcaggaagcacacactctagtttgggacagcgaggagaaattcaataagagaaatatatataaggcataatgctctaggagaatatgcagtggataactgcccaataggaccaggcaaggctttttagaggaggaggtggcatttgagtcaagtgttaaaggctgaatggaaattcactggttgagataaactccttaggaggaactactttaatagaacttgccgttagtcctgaaataaatggtgtgcaaaatcattaccatctgtcaattcactcagtctactttgctcttaacttcagaaaaaaatcagaaatacaattaaaacatttgagcctattttactgtcttttaaaatgagttaattcaaagaggaaattaaatataatgagagagaatctcccccgaggattgggggctggggaaatgctattgattctttgcttgtgtttattttctctcaaaaatacattatgcataaacttgatgatcaaaaattcagattattacatttctaaattggcaatgcaatttattgcatcatacatcaatcacaaaaatgctcatcttgctgactttcataaacttctaaatgaacaaaaatgcaaaaatagtttatactatattacactatagtagatttgttaaactaaaccagaacaatggtccatgaaaaataggcctctgactccaaacgctcacaccacaggatctctctgagatttttgtgtcatttcaagtcagagaaaattgtctaataaattgttggcttgtaacaatgaaaactaagatatctgtggggctattcttgttctcttcattttactacagcagctctgcccagtagaaataaaatgtgagccacatatgtaatttaaatttctctagtaggcacactgaaaaaataaaaataaagaagtgaaattaatttcaacagtatgttgtatataacccaatatacccaaaacattgtcattttaacatgtaattgttacaaaagttattaattagattttttccgttaagtatttaaaatctggtaagttttactcttacagcgcaactcagttcagatcagccacatttcaagtgctcagtagccatatgtgtctagtggttaccatattagaaagtagtttgagagatccacattaaaccaaaaggaaaagaacttccggcccttcactgatgagtcactcttcactgctaaccttggaagcattcccaaatgtagtctacagagtttaaatagtctatcttaacatctctcagggcttcagtcttaatgccatagtatttttaaagaatggtggatattcttttttacagaacactctgtaagagcaattagaagtttatgatgcacgtaatgcaaaatacaggtcatttcccaagcctattttaaaagcgcaaaaactgtagtcatttatcacccctgagaatgttgtcttaaatgtcttggtttggatattggtgatgtgagaactttgtgataagaaagtagtctttaagaataagatatcagactaaaattcatatctagaatgaaagtcttgtttttaatggaagattaagagcaagtctgattcagatcatgcatggggtacactagtctaggaaaacactagtctgaaaatatactaaaagttacttcgcaacttaacaagaaaatgtcttgtgggtgatgtcgttcttgatttttaggcaaacctacctacctttgcaaagcagctgggacctttttgcattggaagaatcatttggagcacaaacaaaattagattatcaacactttggaaaacaactacgaatgagcaatcagaaacctgaccttaagattacttgtgaattgtgaatcagcaaaataaactcgattgttcattgctaagtgtatttcaattatcaagggccttctagattataagtagtcttttttttttacttagtttacaattaagatgtgtggtatttgaaatacatttgccacagggagaaatataaattataattaatttcctaggctaattcaatttatgacatacctatatacattatctgtcatctataatttttcccttattgtttacttcccactggaagaatgaaaatggaatattattacatggcacatggcttgatacttttacaaactctgacaattatgtatttattttgggaggcattgagtttatttgttttatttatataaatttatgaggtacaagtataattttgttacatgcatagattgtgtaatggtcacgtcaggccttttagggtatccatcaccttaataagatgcattgtacccattaagtaatttctcactctcataaaattctaattatgtgaatttaatttaatctatttaatgtgttttaggcaaatatagccggtactataaacagttgattttaagatatcattgcttacattgagactaagtaaaacaaaatgggtcaataaatgtcaatctagataacaatgtcaactaaataagaggtcaaacatggcagtatttttgaaggtgatctgtgaaagtgattatagcgtttacactcatggaaaatgccttcagagtttcaactaagaatgccaacagctcattcctttatcctgatgcatattgtcttccttctcacccccagttccttcttcccctaacccctacccgctttcctttgctgattttgacagaaataggacccccaataagtcagggagatagcaggaaatgggataggatagaacccggaatgatagaatagctgagcctgaaggcatgaagaaaggctcctcctgacatctaaatggagacctaagagatgggttggtcaggtagggggaaggaaacatgaggagtattctctaagccaggcaacatactgtgcacaagtctgaagtcatgggaaagtgattttgagaggattgctgcttggtaaacctagagtttgaattgggagagatgaagctagaaagttagtaagggtcagattttttttttttttacttgcatgacaatggtaaaaaccactaaaggttctgtgttaagcagaggagtgacttcatttaaaaaggtaaattggattgaaatgaagggcataaactgaggcaaaaatatccttcgttaagttattgaagcccagttgaacacactggtggcttaaactggagtattggtataagtgggggaaagaggttaatagattccaagttgaaaaaaaaaaaaaaaaacatagactttgctatctagtaatggattaatatacaaaaggaaaaagtaaagtttctactttttggacagctagaaaccttcaccgaagtagggaacccaagacttagattatgttgggaggggcagggtattttagttgcacagggatttgctttacagaaatgactgaatgacaatatagagagatcaattccattaaaagaagtttgattactcacagttctcaagggaagagtacatactacgccatgcaaagccatgcaggaaaaaagttccagagtcggtcagcaggcagaaaaggaaagcacagcccaaaccctttattgtggtttccaaggaaaagaaatgagtgaggtagaataggcaagtctgagcaagtttaggactggatagttcaaataatttccaaaatttcctggctgtaaaagtggtctctggttgtctggtaccaagccctagggtgaggggaaaaagttagggtgggggaaatattggtttggtgtaacaacagttagatgaagaaggtagttggggatacggactttggattagttggtttgtataacgaaaagcaatccaacaaatccacaagggagcaagtttacaagttatttgctatctttaggaattagctagccctgggaggggcagtctctccctggccttccaaggacctcaagatgttcaagcatccataaaatatggaaattttttaaaaacattataaatacacagagtaaacgctgggcatgatataggacagtggttctcaaactttagctccactggaatctcctggaaaacttgttaatatgcagatgaccgttttacccttaagcttctaattggggaggtctggggagggcacagataatttgcatttctacaaagttcttccatgattttgatgccgctggtgagggaccaggctttgagaacactgatttaggacgtgtcctgtttagggaatatccaaaaggcggacaagttcagggaatattcttgggcagttggctgtgtgagtctgaaattcaggatagaatattaagctgaaataaagatttgggagcttatctacagtcaaatgataattgaaatactgagagtacggggggagagaggtccatgtaccaagaaaagtgaaaatgactaatcccaagcctcgctgaccattgagaatggagctaagtgagaggagttaacaaagctgacccagaaaaagtcataagggccttaggaggccaaggaaaaaaaatacattcactgccaacgagaggcacttacgaatggcttgactggctttgccagcatgcatgaactgcttcataattatttgtattgattacagtaacagatacatattttaacaagcaacttaagtaatacaactgatttttaattatcttgtttaaattgataaaggttgtatatattcatggtgtacaacatgatgttttgatatacccatacattgtggaatggctaaatcaagccaattatcgtatgcattacctcacatacactttatttgtggtgagaacacttagagtatactcttagcaagtatcaagtatataatacattgctgttaactatagtatccatgttgtacaataggtctcttgaacatactcctcctgtctaattgaaattgtgtttccttcgaacaactgatttttttaaataaaaaacttaatacctgtaagttagaattcttaatggtcaccttaggagcctatacaattattcctacgttgttgttactattctgtgtctttttcttttttaacatctttaaaggtatcaaatttttatattttgaaagtagaatttattttttgtcagtctaaaatatttttatgttgaacaaaatgcatgaatggtaaacctagatgcaatcaatttttcaaataaaaaaagtagatacccatgaacatttcttttgtaattgcaaactgtcttgaaaggcagtttcaaaaagagtttagttcctaaattgtaccattactcactgcgttaaaatgcaacattcatttgagcgtataaccttttgatcaatttgtttttgatgtcttgttccctgagagttgtctcaaatagatacatataaatatacacatatctcagattggctctgagaaatgtcttgattcaaacgttcttgattctaagattcatggtacataggaactgtatggtgacaaccttgtcagcctatctttagagtagctttggattctattcagaacatttcccaaagctattctgctatcaagaatataaacaggaatagtcaagggaagctttttaaagggcaacattttcatgtaggcatttttctcacattgaaaactagtttactaaatgcagtgtattaccttctcattacaagaagtctttcacattagtataaatgcatatggcagttgtgccagaaataaattgcctctcaaactagcacatggaaagaagaattctgagatttagcacatatgtagcttttaaatagtatactctgtttcaaacattatgtgttagtccacgttctcttcagccattttcagttgcatttttactttatattcctttgtatatttatctttgctaatcattgtcctgagattcctttagctcttgaattctacgtttttaattaatagaaaactttctttttatttttcccccgacatagttgttttctagaaagaaacagttataggttataaatccaacactttagggccgacttgaacatgcatcaaagctactagaggacttgtagaaatacagattgaatggtcccatgcctagagttttacattcagttacagatagggtaggacctgagaattcacattgctcacaaatttccagttgattttgatggcattggtctagagaccaaaccctgagaaccattaaaaaacaaacaaacaaaaacaaacaaaccaaaaaaaaaactatatacagagattttcttcattggcttttgccactgaagacatttagatgaagagactccacaaagtgtaatcatttagttatgagaggggcctgataatttgcatttctatcaaattcccaggggatactattgttgctgattgagaaccacacttggtgaaacactaattaaaataccattaaaaagcaaaaacaatttaggccagcaaaacctcctaaagaatgaggcctaaagacttattttgttttatttttgccagaagcttcttatgggcaaaattatcaccaacagagctgaggttcaaacttgtgttcatagcaagcaaaagggataatttggaaaaaaagctgaggttagctttgtggttggtttgggagtgggaatgagtagggaggaagaaatttaaaaaaaaaaaaaaaaggaagaagccaaatattaaattgttcacagggcgaaaaaagagaaaaggagtaactagaaatatcttagactggttcggcaagtcgggtccctcgcagctaacagtggtcccaccctctggagtttatatgtttacattctttttttttttttttttttttttgagacagggtctcactctgttgcctaggctggagtgcaatggtatgatcacagctcactgcaacctccacctcctgggctcgggtgatccccccaacctcagcctcccaagtagcagagactacaggcaagtgccaccatgtccagctaattttttgtatttttttgcagagatggggtttcaccagttgcctaggctggtctcaatctcctaggctcaagtgatctgcccacctcagcctcccaaagtgctgggattacaggtgtgagccaccgcgcctcattggagtttgcattctagttgggaaaatagccaataaatttgtgacttattttcctttaaaaaaaaaacttattctggctattgtgtgactataggatatggaaggtgcaagagtatgaggctaacaccctgttctaaattccgtctcctctgagccttgttctgtcaagaatctcctccttctatactttttaagtcaccttcctactgatcctttgctgtcagcttaccactctggtacccttcattttaacaaacaaacaattgtccaagcttaccggtgctgctccttcacccctccacctgtacctagtgtcaattctctccctcttctgatggccaaactttgtgaaactgtagcacagctccatatgtgttcctgcaaaggacatgatctcattcctttttatggctgcagagtattccacagtgtatatgtaccacattttctttatccagtctatcactgatgggcatttgggttgattccatgtctttgctattgtgaatagtgctgcagtgaacatacgtgtgcatgtatctttaaaatagaatggtttatattcctttgggtatataaccaataatgggattgctgggtcaaatggtatttctggttctagatctttgaggagctggaagccattatcctcagcaaactaacacaggaacagaaaagcaaatatcacatgttctcacttaaaagtgggagctgaacaatgagaacacatggactcatggaggggaacaacacacactgaggcctgtcggggggtggggcgaggggagggagagcattgggaaaaatagctaatgcatgctgggcttaatatctaggtgatgggcaatagcaaagacttggaaccaacccaaatgtccaacaatgatagactggattgagaaaatgtggcacatatacaccatggaatactatgcagccataaaaaaggatgagttcatgtcctttgtagggacatggatgaagctggaaaccatcattctcagcaaactatggcaaggacaaaaaaccaaacaccacatgttctcactcacaggtgggaattgaacaatgagaacacatggacacaggaaggggaacatcacacaccagggcctgttgtggggtcgggggaggggggagggatagcatttggagatacacctaatgttaactgacgagttactgggtgcagcacaccaacatggcacatgtatacatatgtaactaaccttcacgttgtgcatatggaccctaaaacttaaagtataataataaaatatatatatatatatctctaggtgatgggttaataggtgcagcaaaccaccatggcacatgtttacctatgtaacaaacctgcacatcctgcacatgtaccacggaacttaaaataaaaattaatcatagaactttaaaaaaagaaaagaaaatgtagcagagctgcctagctcaccttctttacccacagctcacttttcagtccatttatctggctattactcctaccgtgccaggcaaactgctctcactaagaaaatcaatagcctaccccctgccaaattgcctgactcagcttctccttgtaattttctcctttagttctctaacaccctcttccccaggttttcacctgacctgtctccataggacatttgagtctctttcctgatgattcatcctcagcctcttccataataagtatggctgctccccagatcctaccctcagcacttcttcactttccatgccacatctcttctgtgatctcatcttcatccacggctctaattagtatctataagcagatgactctcaaagcatatgctgcctatgtacccctcttggccattctacattgacatctgcaactccccagtgaacttctatatttagaccacaggactggtacctgctgataagcacaggtagggtgtactgagtagtgttttctctatttggttgggcttttgctaaagcagttgtcaaatattttgagtcttactcatggccacagacattttaacattagcatgtcccaaactgaaatcccctactgcctctattctctatttcagaagatggcaccaccatctacccaattatttaagctagaaacttctgattctggtgagacttctctcttttatgcatatgtctacactgacacaaaagactgcaaattttacctcctaagtctgtcttaaagcagatttttctctatgattctctatggtttcaggcccttatcactgtgaagtcaagcatacctgattcgaatcttgtcaccgttggcaaatttttaaatctcttctagcctcagtttcctcataaagttttctgtttcttagggtgactaaagggcttaaatgagattaccatacagagagtaaggtacataaaatgcaattaataaagaatagtcactataactgctgatgatgatgctattactattcgtatcctagaaaactccggtaacttgttcactggtctttctgcatctagcatcacttcctcagccagagttatcttctgacatgaaggctgatgccgtcacccccatactcatgtttgaaattcttcaatacctttaagataaattcccacctccttggtgtagcatgcaaggtcacacatgacataatctctccaaggccccatttcttccactctccttgagtgatatatgtggcagaaaatttaaggctgcctggatattatccaccttacgtcccaatacttccatctgccgcaaagaccttctacccaacttcccatcctcaacgaattcttattctttctttaaaaataacctcaaacttcagactagacctctggtccatagggcattacaaatctctcagtaagttgtacaggatgaacacgccccctaaaactttgtttcagatatttcaatttttattttattttattattattatactttaagttttagggtacatgtgcacaatgtgcaggttagttacatatgtatacatgtgccagatatttcagtgttaaaggtttaataatcacatttacagaaaaggaattagctacaaaatggtggcactggtatacaagtatgtaaagatacagtgcttacaatttaggattattgttgtcgatgttttaatattaaaatggctaatcatacagcaaagtcgaaagaaatttacggtcaacatctgtatacccagcacctatactttgccattgaaattttactatacttgatttattacatattcatctatccatccctctttctgtgatcaatttttaatattctaatactcttacccttaaataataagttatcttttcaaaaaataatgtgtttttacatagatgaagcaaaataaacttgcccttgataaaacaatatgcactgtagtgccttctaattcagtgcattgaagtatccattaacaatataaccagagaatataaaacatgtttattaatattccactgtacctgattagatatagaccattaggaagagttattataattaagaatctaggtttgtcaatatagaaaaaaacctgtgttttttatcccactggaatgtcttgtgaggaatattgttcccctttttctaaaatttaactttgacctttattttgttaatgcaccatgggttaagccacactacgacatgtgctaaatagacctggaagttttcaaactaggtttttaaagtgtatttgacattaaatcttcataacaccttattgattaatttaaatccattaccatggtaaggaaaattcgcagacaggcaggtgaaaattaaaatagaaacaaaacaacatggtaagcaatccttccccccaagccaatcagcatgtagtcagtgtgtccttttaaattagcaaggcgcagcttcccataaagtcccagcttgattttatatgctgcaatagtattgctaaaataaaggagaaggcaacttttctctataatttttttctagaagttttcacgcagcttagtatactgcaatgaccacattactcagttccagaattagcagcattccattgtgaatgacttaattcacattgtgattactcatttaacaacattcttgagggtttacaatgtgcaaagcattacattaagtcgtgtgtggcagaggttctcaaatgcagatgatctgtgaagaagatttcctcaataagcagagaaatgagaactataaggacagaaagagagagagagagaaagagaaattatttaagcttgtagcttgtcatcctcctttcttaggacagcctaccatttaggctgagactatgtctttctgattatttcttgtggttgaaataccccttccttaacaatatgatggtaacagtggatggtaaatcttgttttgttttaatagtttacctggcaaaagtatcattttatgtctgtatcagttatatataatagtatatcagtccattaccaaaccgcctcaaaactcagtagcttaaaacagtaggtacttcttgagttcactaatttgtgggctgatggtttacattgggtagtttatctgctctgactgggctcccttgggaatctggagggtagctgagagcttaagtgtctgaaagtggctgggtcaacacagctctatcgctcacatcttgaacatccctccagcaggctaaccagcccgagcaagtcctttttgtgaaggctgaggtgaagagtggaagtgcaaacatgtaaacaatttgttgagcccctgcttccattaagcctgcaatatccgattggctaaagcaagttttatttccccctgtggtaggcagaatcatgggcccctcgaagatgttaatccccagaacctgtgaatatgctgtgctccctggcagtagggaattaatattccagacggaattaaggttgctaagcaggtgactttgagatggggagattttatggactattcagatgggcctaatctaaccacagggttcatataagtgaaaatggaagcaggagagtgggagtcagagagatgaagatagcccctgctggctttgaagatagagaaaggggccattagccaaacaatgttggtagcatctaatgctggaaaaggcagggaaatagattgtcctctaagcttcttcagaaggagtatagccctgccaacactttcattttaatccatgaaacccatttcaaacttctgacttccaaaactataagataatcaatttgtgttgttttaggccagtaagtttatggaaaattgtcacagaagcaataggaaacaaatatacgctccattgttcaatcttttgaataacacatatactattatttacttaatgtttttcttaaaatcagctcattttgttttctgcttttagccttaagtgataattcccacaaaactgtagtctgatgttgcagtgtttttttccttaatacagataaaactaaatgaatattaaaatttaaactataagctgtttatctgtgtaacatggtaaattggctccctaccactactgttcagcaaaccacattttgggaaacagcgatttaggtggttcaaaggagcaagtgattgtgcaagaacaagaatttattagagaaagaagcatttggccaatgggtagaattgttggcagacaaaggtagaagagaaagacaaattattcagtatggctctagcgaactctttgcacttttatcacacaatctgaagcttgctaatcttgacatgtcttaatgttgttggattgctcattaaactggctgaaatgttcacaaagactctcacctgtcttctggcttaagctgagatttatcacacttcttggaaacatcttctggtctccagatctccctcagctaagctatacagtcagtctgttctgtaagaaagcccaaacttctctgcagtgttcctcagtctttttgatatcatgatgaacagattaagttgatgtgttcatcatgatatcaggtaagctggccgaagactctaagctgcctaaccatcccagggctgagagggatcgatatctgaagtacctataacccaatcagggcatgtgccttagcatacccattggaaagccctgttttagagcctttatcagctgtgaacttattgaaggcaatgattttgtcctgttaatcattctattcataattttcaacaagatacgtggttgttgttaataataattgttggttgaaatgaagttaaataaatagcaattgacttttccaaggtgacgcattgcacagatttatttatcttccctttgctgccctggagtaccagttgtatctaccaataagcttcatttataggccagcctcatcttagtttctgaattagtctaagtggctctggtagcgcatcaaaaatcttgctttctgatggtctttgtaatttgaattctgtgacttacagacttggtattcaatatgtcaggaataaacctggggtgtgcccaaatggtttgaaaaatcccagccttcctgatttcctctcttctctttctcccctggccaccctaatagtctgatagtttttgttatttggatactcctaaactcttggcaatttttcttacatctgttctctacaggctgtcacaagtgagtggaggcaggatggcatgggctgcagtggaaagaccaagaaaataagttaaaagccctgggttccagtaaatgctctgtagtgggatttagggcaagtctcttaacttctctcagcatcaatctccgcatctgtgaaataagattaatgacacctgtcttgcctatacttcaaggttgttttgaggttcacatgcattttccaccccatatagcctataaatctctgatgcctacagataacctataatgttctccagtaagtttaatatttccaggattttaaaactcaatgactagcactgctctgatctaacataacatattgtgtcaatatgtgtgggagtctctctggttgatgttaatggaagtttgtatagtttacctaaaatagaataaagctataatattaatatatatcatcgatgtgttttaggtgatttttttcaatataaaggcaattttggttcaaaattaggtagaacatttaatttttactaatttacaaataaaatgataacatcaaaagggccccttcttttaaagataagttgtaactctcacattgatagtaatctgtcatttaggacagggaatccatgtagtttgaaaattcattggcatcatggagctaaaacagtggctttttaaacatgtcgatttcagttttctttgttttacaagtcaagtagtgatattactgggtacatatgaagcatactgattgaccaaaaaatagtaacaaattttgtaaacccttcacttaaccattattcacctttcccagccacataagaatcctttctctttgtccttagattaattgcctttctttaaccttttcaattctaagtccagacaagctgctgtggttctttaaaaggccacacaaaataagtattgtccagtgctaacactctgaaatgtgatattgtaattactaccaagtgaacattaatcactactagattagaatggaattacctgttatattcacattaatagcaaatgagctttccctgattgatgttgttataatgaatacaaaaggaattaatagtgatctggcactcaccaaaagaggggtagtcattaaggacatgccatcaaaaggcgggtaatactttacaaaaaacaagtattaattaaagtaatatcacaacgaatgcctattgaataacttatatccacattacaaagatattatatggttgcgattaatgtgattgcaatacattttgtaaaaattaataatgactaaccctttaaaatatttaggaagcagatatttgtttatatttgctaaatagctatgccaactctttagcttttgtgagtgacttctagcataggaacagtgatggataatatgaagcactatatataataactcatcggccgggcgcggtggctcacgcctgtaatcccagcactttgggaggccgaggcgggcggatcacgaggtcaggagatcgacaccatcctggctaacacggtgaaaccctgtctctactaaaaacacaaaaaattagccgggcgtggtggtgggcgcctgtagtcccactactcaggaggcagagcttgcagtgagccaagattgcaccactgcactccagcctgggtgacagagtgagactctgtcaaaaaaaaacaacctcatatatttttacttgaaaacatacattttgcctttaggatttttacttgttagaatatcctaaaggacctataattgtaaatgtaaaattgactaatttctgggttttaaaaaaaagtatttgaaagctgatctgctgtgaacattgaaccagatgttaagaaaaatgctagtaagaaatgagacttgggagcaaagaagcagaactaaacttttcatatatggtttctatggagtaattgagaacgtacatattaacagggatacaaagtcaggccctctcattcaagatgctttctgtctttaaaaaaaaaaaaaagtaatttttgaaattttctgtggcaacagtcccatagcagaaagcaaagagttttgaattaagtgatcagaatatcattcttataattttactacactgaacattatttagaaaattttgaatgatattaaaaccgctataaaacatacttgcctaccataagacttaggatttaagccagattaaaataaatatttatttagaaggatgtatgtaagaactggtgaaatataaatgaggtctgtatttgagttaatagtattgtgccaatgtcagtttcctagctttgatgataatgtactatgggtatttaaaatgctatcattgggagaagctgggtaaaaggtgcgtgagaagtctctgtactatatttgcaagttttgtggtcttaaaccatttcaaagtaaagttattttagaaaatatctaaatatatattttagaaagtattatctttttctctgtaactagtggctaattagctcagtctgaaagagtatgtagaggtggaactgctaaatatatttctgatctagacttacttgatgatgcttgaattagtaagtgaatgttatgtgccaacatatgctatgatacatataaatatataagattaaatgataggagctaattatttcttggcatgttgcagtgggtccatttaaaactgtttatgtaggaaactactgtaattataaaaatgagcacagcccaacagcccagtatattagttgaaatataaaaggcgttgtgtccaagatttgaaatgccttacaataagcttggcacttacttaccttcacacaaagcagacacattttattgtgattttagtgttccatattatatggtacagtaccaaaggaaaactctaaaatatgtactcaaaatcctgatgtgcccttctttccaaacaggtggcaccacaatgaatataacctttagagttaatatctgaggacaaacccagcagttacaccagcatgatttaggtcctgctgttacaattattattattgtatttatttcacaattaagttgcagagttgagctcgatatagttccagctgtggcttttttttcaactgtctcaatagttcatagatatggccaaatgttcaataatagtgaaagcttatagtccacatattatttctgtagcaccaattttatgtgaaaaaatgatttatctaaatctcagagaatttccataactagttttgttatacatctacaaaactaagttaaaagaacagagcagactttttaaatagctagattggccaaatccacctcattatcatcaagaagatactgaaacaccgtgtttatacaacaagaccaggcattgtaaaagaggaggaaaggtagagacaaaatttatttagccctcaggaatctttcattctgatagtgtaaatttgacaactttagagggacttattaacatgtatcttatatatcttgataccgaatatatattttgtgattgcattagagccatgaaatattacacaggtcatttgaacatagcattttcatagagaaggtgacatttgcaaaagattaggagaaaagtaactacgattagaaaatcgtagttttattttgtctcttgagaatgaattgatgttaattttatgtctgatttggccaaatacgatgtggaatttgctaaagactgaaaaaagaagagacatcaaatagagggttgcaagttaacagaccatgttataattaaatgagggaaaaaaaagtagagttgttaaactcccagagaagtcatttccccttggtttggtgcatttcactttggtggtgaagtaaatgaccatatgggcacttttctagctctgtccgcaggtagcactgggtatttgtggacaaattacctagcttttcatagcactagtttccttgttgatagacttcagaattctaaattccattttacatccttatttctatgtttaacttaaagataatcctttgcagccgggcacagtggctcacacctgtaatcccagcactttgggaggccgaggcaggcggatcacgaggtcaggagatcgagaccatcctggctaacatggtgaaaccccatctctactgaaaatacaaaaaatcagccgggtgttgtggtgggcgcctgtggtcccagctactcaggaggctgaggcaggaggatggcatgaatccgggaggtggagcttgcggtgagccgagatcgagtcactgcactccagcccgggcaacagagccagactctgcctcaaaaaaaaaaaaaaacaaaaaaaaaaacaaacagatcatcctttgcactggaattatcctgcagtggaggatagtaatgaaagtgtagactctgtttctgaacactagctatgtcactttcaaactgtgtgattttccttcaagtttctcaatcactccaggtctggtttctaaatagaggaataggagtagagattaatattgtgaagattaaatgagaaaacttatataaagcacttagtacggtgccctgcatattgtgaaggcttggtatgttgttagtagattcattttattatcattattaataatactgaaccctggctgttgggggaattggttctatcctcctgtctcatagtcaaaataggttaaagggccttctatctcttatttctggtggtgcattataattactaatagtaatgtgcttcatttgtatatgatcctttatagtttacatggcgctgttttatgtaatcttactaaaatttcaaaaataattttaaaaagccagaattcacaagaatgtgactcggagaagaagtagatgtttttctaagtagatctttcagtttaactgattcaaattttctcatgtttcatatacatgattatcatgtcttttgataaacagaatgttaaccagagtacaaccttgtatgaacatatttattcagcttagaaaagatccagaggtacaaaatctagatcccagtgtagaagttagcatacacagtacaatttctagtatgtccataaacaatatgttaaagtattagtttgagccatataggattgccaatatctgagtgttatagagctacaaaattagtaggaaattttgttgctttaacctaatcattaaattagaattgtgtgacttaaagttacaaatggtttccgaatattttgcagtaaaaaagtagtgaggaaaataaatataaatactaaactagacctgggaaatttaaggctataaagaattctagcttacagagagaggagtctttgtttgcaacctcccactagctaaatttaaattatcacaaatttcatcctctcctttacttaacccttgactcatgcaactagtcaaatgtctttttcttgctaattttttctttccatagatcacttatagggagttctggttaaaaatgatgtctctttaaccttcactaaaatgagaataggggaattaaaatgatatttaccacaaagagaaaaaaatctgggaggaaaaacaataaaataaaaaagataaaaaatttaggaatatgcagagaatggaggagttagcatatcttggaaacctgaattccaagtacttagaacttgggaagtcctagaaatgtgaagcaccagctactgcagaaggcagagatgaatgtgaggtaagatagtgagactgtgaagagaaatcattcagtaaaaaatgcattatcaagccaactgccactggtctagtggagtttaatcccactggggaaattctaaatggattgaagacatgtgtttaagagttagttattctttcaaaggggcaagggagctggggtatttatacacaaaatcctgctagtcattggtttaggactgcttccaacgggggaattattttcctagcatttctggcataccaccttggcaagaaaaattattttgtgtccagagtatgtctaaagccattagggaaaaaaaatgtggatcctcatagttgaaagccaggccagtctgcactaaagtggtaaggatgttttcttttagagatacaggtctaagaaagaaatctgaaggtggttacctcttatgcaagaatttaatttgatggattcaaggtgtgttggttaagagaaatggggaagggttgcttctcatgactgcggcacgattctactatactaaatttttcttttattaagcagcattgccttatgcaatgataggaaacatttgttatatgtgaaatcacttttatttttattttttaatctattcctattcttttcatttttttaacttttattttaggtttgtggggtacatgtgaaggtttattacataggcaaaccggtgtcacaggggtccgttttacattttatttcaccaccgaggtattaagccaactactcagtagttatcttttctgctcctctctctcctcccggcatctcttttaaaagaaaataatttttagcaattctttagaataagtcttggccacctaaaggtttccaggactctagttcagggagtatttatctaagtcagtagttcttaacctgatataatttcatccccagagaacatttgacagtatctcaagaaattcttggttgtcacattgggggcggggatactgctgtcatcaagtgggcagaggccagggatgctgctcaacatgttgtaatgcacaagacagccccccacaacaaagaattatttggtccaatatgtcagtagtgccaagtttcagacatcctgctctaaatcaggactgtgatgtgaattctctgcgatgatgaagatattttatatccgtgatgtgcagtactgtagcatatggctactgagcaattgaaatatagctagtgtgactgtacaccaggtgtgatgttccataccgaggaaagaagtagaaataagatatagtctttgaagtcagagctcacaatctagtagcggagacagatttttaaaaattacaatattttaaaaatattgcaatagaacatggtaatgttagaagattaataacatgctaaatttgaggcatcaggactcagacagacaattaaaaattctctgaggtgaatttccacccttagctcagaatactgtaatgtttaaaagctgttttctatacacacacacacacacacacacacacacacacacacacacccctttaaatcttttatcatgtaactcattgcttcttattttacccttttgtcagagaatacatataaaatactggaatctgatgggacattctactttatttaacaatgctattgagtttctcaaaatagtttcctaagaaagtctattaaagtattgattttttcataaaggataatacaaatggcatgagtctgtttaacattttaatcaagcttaaaattagtcttgcatttgaaacaaacttgcccagagaaattgttgagaaacttaagagaaaaacatcataaaaaattgatgggccagccaggctgtgagaatattaaaatccaaatctaaattatggttaaccattgtcacatctttctttgaagcttaagtaactcgatattccctgtaggatacccagtgattcaaagtgacacatatactgtcagctcattttccttcccagcatgctggtacaatttgtatccatagaaatatatggaaaaacctattagtcttgagtgccagaacctaccaaaaggaatctttgtcatctacaaataaattaataacataagataaacaatcctattaagttatactggcccgaaaagggaaaaaagaccagtttatgaattgacaaaagaaggtaaatgagattagccatatagcaaccactcagataataatgtgttttctctgtttagtaaaaaagcatatttgagagaaaattttcccttatagaacaattcttaataatatacatagatactcctttcctgggatgtagagtttaatcctcccctaagcccctccatgaacttggtaacttacttccagataatagaatatggaaaagtaggaataacaatggagaagaaaccaggcaggcaccaagttaactaagtagtcaagtataacatcgccagtgataataatattgatatcatgtctcctgtgatatgatgtcatgaaaaggacatgttatctctctggtattcttccccaaaacctgtaacttcttctaatagggaaaatacttcagtcaaatcttaagagacttctagaatatacctgactagtcctattcaaaagtttcaaggtcatgaagaacaagaagaaactgagagactgtcacagactagaggagaccaaaaagacccaaggaccaaatgcagtaggagattctggattggatcctgaaacagaaaaatgacatgagtggaaaaactggtgaaatctgaataaagtctgtagttttgttaatagtgttgtatcagtgtttgtttaaatgtttagataaatctctcatgcgtacagaagagttatcattaggggaagctgtgtgtcaggcacttagaaaactttcagatacataggtaccttttgtaagtaaaataatgaattaatgggtcattttatgtctgtattttatataaggctacatttctaaagagacaaaattgtgagtcccataaaaatataaaatgaatatgtgtaaaacattttattagatcattaactgatgaaggaattagtaagatgttagttacagttggttcaaaggagagtctgaagaattggcatatatatatacgtatatatacgtatatatacgtatatacatatatatacgtatatacgtatatatacgtatatacatatatgtgtatatatatattttatatatatacacatatatatataaaaaacactctagaatgctgataggaattttataacagatacaatactgatcactaactgtagggcaggaatctattgcgttccatgagaaaattttactggcatctagtgaacaagaatcatttgtgtcaccatcagccctccacaaattgacttttaaacgtacagaattgcaaaatagcataaccaaagtctaaggtacagactcttagataatcagataactcctaaggttttcctaaggaattaaagggaaagagacattctcagattaaggaaaacaaagaatttcttgctagcaaatctgctcttaaagaatgacaaaaagacattctctaaacagaaaggaaattataacgaagtcttgacatttcagaaagaaaatagtagaatgggtaaaaatgagagtaaaataatagactatcctatttaccataagtttgaagtgaaaactttaacaccacctgatgtggttctcaatgtatgtagagaaaatacttaagagttatattttaaaagaagacatacctaagtggaagtaagagtccttctacacgtcacctgaagtcaattccagtagattgcaatgttaatgcgtatcgtaatgcctggaaagaccactaaaaaactatacaaagtgatacgttaagaaaatacaacaaataaattttgatggaatcttaagaaatgttcaaataacccacaagaaggtaagaaaaaagaaagagaagaatgagaaataaagaaaacaaacagaaaccaaataaggtggcagattgaagccctaatatatccataattaccttaaatgcaaatggtctaaatataccaattaaaagagatttagctgagtggattgataaaagctgagcacacaatatgccgtctaaaagaagtttatttcaaatacaacctaggtaggttaaaattaaaagaatcgaaaaagttacattatgcaacaattaatcaaaagaaagcagcagcagtaatgttaatatcagataaagtaggcttcattgcaaagaaaattactagtgacaaacagggacattacataaagattaagtgttaattcactgggaagacataataatcctaaatgtgtttgcacctaacaacagagcttccaaatacatgaagcaaaaatgaatagagctgaaaaaagaaacagacaaatccatatttctagttagggacttcaacactcctctctcttcagttgatagaactactaaatggaaaataagcaagggtaaagagaactgaacaacaccatcaaccaataggatctaattgaagcactcctcccaacagtagcagaatacacattactttaaagctctcatgaaacattcactgatataagccatattctggactccaagcaacttcagcaaatttagagaattcaacttatatgttcccagaacataatgaaaccaagctagaaatcaataagagaaagacaaaagaaaaacctcaaaacacttggaaatgaagcagcacacctttaaatcattttccccaggtcaaggaggaggttgcaaagaaaaattttttaaacacaaagaactaaataaaatgaaaataaaacatcaacatgagtgagattctgaagcaaagggcaagcatatctactgtctatttttaaagattaagcttccttaagctcagggtttctctcctgtgatgcaatccactgtgtgtacaggtgtctcctgaacttctttgggattactctgtgggaactggctcaataaaatgttggttctttgactactgctttgctgtgagtaatctagtctttttctctggcaaaaaaaaataaagtgagatgtcataaaagcagtattgagaataaaatgtatagcattagattatttagttagaagacaggaaaggtctaaaataaataaatgagcctagagacaaaaaccatcaacaaaatattaaataacatgcgtcaaagtttaaaaaaagagtgtcataccataactaactgggatttagtattgaaggctggctcaacatttgaaagttaattagtgtaatctaccatatcaacaaactaaagaagaaaaaatcatatgattatattgattgatgcagaagcatctgacaacacccagcatccattcatgataaaaactatgagaaaactgggaatagaggataacttccacatcttaataaagggtatctacagaaaactacagttaatagcataattttaataatggaaggcttaatgtttccacccatgattgctaattagggaaggatgcccaatttcactactcttttttaacatagttctggaagttccagacactacaataaagcaaggaaaaacaataaagcatgcatattgaaaagtataaaataaaattatttctatttgtggatggcatgactgtgtacgtagaaaatatcaaatattctacaaaaacaaaagcaaaaataaccaaaaatgctcatggagctgagaagagaggttaacaagatccaaaaatacaagatcaacacaccaaagctagtcacatttttatatacagatgctcctcatcttatgatgggcttacatttagataaacccatcataaagtcaaaaaatcataaggcaagccatcacaacttacggattatctatgttggaaatgaagatgtgaaaagtgaaattaaaaacacaacaccatttataattgcttatccaaaaatgaaatacgtaggtataaatctatcatacatgtacaggatcggtatgtagaaaattataaaatgctgatgaaaggcattaaaaacaacctaaataagtggattatatggcatgtttatagactggaagagtcagcatagcaaatatgtcagttcttctcaaatcaatctaaaggtttaatttagtttctatcaaaatcttatcaaggatttctgtacacatagacaagcatactctaaaatctataagaaaagtcacaggccacagaataactaaaacagtcttttaaaaaggtaaataaagtgggagtaacctctctacccaatattatggctaacaatatagtaaggctatcaatacagtatgatgttgctggagggatagactcatagaccaaatgaaacagaatagagaacccaaaaacagacccatgcaaatgtgcccaacagatttttgataaagttgcaaaagcaattcaatagagaaagctcaccttttcaacaaatggtcctgcagaaattggacatccctagagtgggaaaaaaaaagaacttcaacctaaatctcacaccttgtaaaaacttaattcaaaatagatcatggacttaaatgtaaaacataaaactatcaaaatttagggaaaaatgagaaaatcttcaggctctagggctagaattggcattgaaagcatgatccacacacagaaaaaaatcagttggactgcatcaagatttaaaacctttgcactgcaaaagacctgtgagggaggatgaaaagacaagctacagactgatagaaaatattttcaagccatatagccaaaagatggatgtctagaatatataaagaactctcaaaactgcaaggtaaaacaagaaacaaacaatgcaattaggaaatgggcaagacacatcaagaaacgtttcaccaaaaaggatatacagatagcaaataggtgcatgaaaagattatcaaaaacattagccattagagaaatgcaaattaaaattattatatattcctacacatctatcagaatggctaaaacaaagtagttacaacaccagatgctagcaaggatgtggagaaaatggatcattcacatattgctggtggaaatgtaaaatggtacagccactgtagcaaactgtttatcaattttctgtaaaactaaacatgcagctaccatacaacccagcaattgcactcttggacatttatcttacaacctgtacaaaaatattcataccaccattattcattatagccaaaaactggaaagaacccagacggtcaacaatgaatggttgtacaaactacggtacatccatacataccaggcaatactattcagcaataaaatggaatgaaatatttatacatgcaacaacttttagatcaatctccacagaattatgctgagtaaaaacagctcatctgaaaaggttacataatgaatgattctgtttatatagccgtcttgaagtgacagaattaaagaatgaagaacagattggtgattgcaaggagtccgggacaacaggggaaagagagagagagagatggatgtgactccaaaagggcaacacaggaggcatccttgtagtgttggaactgttctttaccttgattgtgtcaatgtcaatatcctggttatgatattgtactatatttttgcaaggttttaccttcagggagacggggtcaggggtatactggttttctctgtattatttctcacaactacatgtgaacatacaattatctcaaaactaaaagtgtaatttcaaaaaacaaataaaacaattcagaaattttaagacttcaacagtcatttatctcatttgttattttactgttgagaaaacaggcacaaagaaactgaagtgacttactttcatgcttcacctaagtctttttttcttttctccatcactcagttaagagcttctgtaatacagaaagtatgtcttgtattcttttaactcccatattacttcaagcaatgttgaacacatgttaacattgtaaaagttgttgtctgagtaaatgggaaagatagaggtctatgtctatatgcaaatactttgtattaacatgtttcagtctgatataactttccacacagaaagtacaaaagaagatctgttcaagttatctgatttaattaagatagtaaaaagaaagctgataatttagggggtcttatttgattgtttttaattttacttattttccactaggtgatcattttgatgattcaaaaatgaaaatttacaaaaaggtataaaataaaaattatttctcctacctctatgcactgtcgaatcaattcccctacccaccaccaatcagtattgtcagctgtttgtatatccttcaggagatatgtacgaatttcaagcgaatatgcataagtttatgttatgtatatgtgtgtgtctgttttctatatatatgcatctttacattaatggtagcatacgatacacattttcttctgaattatgcttctctctcaacaatgtttcttggacattttcctgtatcagtacataaagaatgtatttgtttcctatgactgcaatagtgaaataccacaaactggatgacttaaccaaaagaagtctgttgtcttacagttctggaggatagaagtctgagatcaaggtgtcaggagggttggttccttctgagggctcggaaggagaatctgttccattccattcccctagtttctgatggtttgttggcaatctttggtgctccttgtcctgtagatgtctgccttcattttcacatggcatgccccctgtgtacgtgtctgtctccaacttccccttttaaggacagagtcatattggactcaggcccaaccaaatgacctcattttaagttgattatctctgtaatgaccctatctccaaatagggtcacattctgaggtaccaggggttaggacttcaacatttaaatttggagaaaatttggacagaattcaacccatagcaaagaacttaaccgttagtttaatgactacatattgttccattttgtggatgtatcataatctatttaagcagtgctctgaacattttattggttttcactttcattgttttgccttaatattggtgtctgtttcatagaatagatttatagtattttaggcttatcaagattttatttaaatcttggaatttaaattccctgtaaatttcaagtgccttgaaggcaagatatattgaggaggggagacttttaaagttcatatgaaataataaataatcgcaagtatctcaggaatgcatgaaaaataataaatgtctctgcatcaataataagggagggggcttgccttatccaatattaaacttgctgtaaagctactgtaatccaaatagtatagtattagcacaaaacaagacaagtagatcactgaagcaaaattgagagtccagaagcagatcagattgtttttggaggccgggcatggtggcttacgcctgtaatcccagcactttgggagtctgaggtgggtggattacctgaggagttcaagaccagcctagccaacttggtgaaaccccgtctctactaaaaatacaaaaattagctgggcgtggtggtgggcgcctgtagtcccagctacttgggaggctgaggcaggagaatcgcttgaacccaggaggcggaggttgcagtgagccaagatcgcaccattgtactccagcctgggcaacaagagcgaaactccatctcaaaaaataaataaataaataaataaatagatacaaattgtttttggaaacattatatggcaaatgtgttattttaattcaaggaataaaggtgttttattcaataaatggtgccagcactctttgcaattcctcttagaaaacacagattgcctcctagcttatgcaatgtaagaatacatttcaaatgcattaaagttttaaatgtaaaaacaaaaattcttggaatgaggaagacgttttctaaacaagacacaaaactcaaaagctataaggaaaaaatataccttgttactgcttaaaataacagaagacaaagtcaaaagaaaaacagcaaatagagtagatgtattcgcaacatgtgacataaagagatgcatatacctaatatacaaatttctcctacaaatttgttaattaaattaatattttttaaaattcaaacaacccagtacaaaactggccgaagtataggaatatgcaattcccagaagaggatatccagatagctggaaaaataaaactatgataatatgcttcctcatagtagtaagggataggaaaataaagaaataagacaccatgtctatctaacaaatagacagaaattaagaatgataatttttaatggaagagagcactctcagatattgcagatgaaacgcaaattgctgtggtctttgaggaaagaaatgtggtatgatctacaaaaattttaaatgcacttaccttttgatcagtcactccatttctgagaatcaatactacagaaataaaagtaccagtatgaaaggctgtatgtagaggatgtgtattttggcattgtctatgatggtcaaaaagtagaaatcaagcaaatacccttcagtgtggaaattattgaatatgttatggaattatttgggcatcccagaatgaattattatttagtctagttagagctgtgtctactgtcctgaaagaatggtgatgatatctttcaaaaatcaaaacaagtttcaattaacatattccatttttaaaataaaaaagataaaattaatcttatgggattacataaccatgaaggaggaatggagagatatatactaggttatcagtatttgttaccttggattttcaaaggagaatgaaagaggaacaaataatgtatcaagtttcacaaaaagtgaaaaggtggaatataaatattactgcaaatatataaccattgaatatgtatatggacaaggacgataagataatatagaaaactgaatatgttggttttattatgaggtggttggattgaagatatttttgtctccaaatactgttgttttaatatgttgtgttttacaaagaaacatgggctgagcagacagggaagccctgataagcatagtacctgccatgtggccattcaataaatgatagttattgattattattattagagttgtagtacagtagtgcctaccttaatatatttagattgatgcccagcagcattgagttaacccgcattttaaggacaagtgttatagctattatatactaatggtaaacttgagtctgtaactagcactgttgaaggaggacaacagagtaatatgatgtgtattggcctggggatggaagggtggtgcttaaggcacagcagattttcactccagccaggtttccttaggacctctccaatgaacaggatacctcccttcctgttctttctaccctcccaccccgttttttgctttttcagtttcagcccaaaggggaaggaagtatgatgactgactccccatcagtccctgaggtgaactgggattttgggagagtgtggcagctgcaaatttggcttcctggagataggatttttgccctcaatctggagaaagttcctgaggctacagctgttcaagcttgtgaagtaggaactttgatcccttttttcaaaagttttgtataattagcatccaacttgttagacagtatgtggctcattacaagattgccacaaattcatgctgggccgtgtctaagaacagggcaaagggagcctttggaaagtgttatacagttgaccctcaaacaatgtgagggttaggggcgctgagcccaacacattgaaaaatctaagtagaacttttcactcccccaaaacgtaactactaataggctactgttgacagaagccatactgataacataaagagtgattagcgtatactttgcattgttatatgtaatatatactgtattcttgcaataaagtaagttagagaaaatacgatgttactaagaaaatcataaggaagagaaaaatatatttactattaattaagtggaagtggatcatcatataggtcttcattctcattatcttcacgttaagtaggctgaggaggtggagggagaggaggggttggtcttgctgccaatctaaatgctgggcccagccaatgggtataagttttaagtgtgcacatattggtgaacccttacagatcacggcactgtctgttcgagtgtctattttgaaatgtccctatccgtaatataagttgcaaaggagtttgtgggcccactgaattctaccaccctgatcattgtgaagcccattcagctttgtgaagagcttatcttggtactaccttagccaaggtatgataactcagacataatgtcttttctttcatggttccttttttagtgatcatagattcagttctgtaataattagagatttatgtgtcctattagtaattgcatcattctttaaagacagtgtcaaccttgctatacagtgtgattgaagccttgacataacttgggggtttgttggcattttgaaatcccaggccccacttcaaaactgttgaatcagaatctgcattgtaagaagatccccaaaagatctgcatgcacaagccttgaaagagaagagaagccatctaacattcctcacctaagatttgaagaatttcccacttatgcaagagtaggggtgtgatttctcaggcaggatatctaacagaaaacaacacttatgaagtgtttcctgtaggagctaagcaggtggccagaaaatggcaggctacaaaggagaagaatgactaggaacctgagcaaggagaaagtctcaaagacaaggaagtggctggcagtgtcagggactaccaggcagctgaaaaagctaggtgtgaacactatttcttggagttttcagcaagtaagaggttcatgatgatgcctcaaagaatttacagtggaaccagagccaagaagtcttattgtggtgagttgggaattagggaaagtgttatacagttgaccctcaaacagtgtgagggttcggggcgctgagccctaacctcaagtaagaggttcatgatgatgcaatcaaagaatttacactggaaccagagccaagaagtctttttttttttttttttttttttttgagacggagtttcgctctgtcgcccaggctggagtgcagtggcgcgatctcgactcactgcaagctccgcctcccgggttcacgccattctcctgcctcagcctcccgtgtagctgggactacaggcgcgcgccaccatgcccagctaatttttgtatttttagtagagacggggtttcaccgtgttagccaggatggtctcgatctcctgacctcgtgatccgcccgtctcggcctcccaaagtgctgggattacaggcgtgagccaccgcgcccggcagccaagaagtcttatggtggtgagttgagaagtagggaggtggaaataaggaatggagatgaagacatgaaaggaatttgagaaatgaggcaatagctagagaagaatataggaatacacagatccagcaacccagcaagggaagggctagattctgatttcatgagcaaattgcctactaattaaattcacaatatcagaggaaactgttggactcacttactgaataatagctgaaaagtatctttgctttatagagagatcactgtagatgaaagtcatcttccagtggtgagatattcttcagtgtcatctcttcatttttatttctaatttttcttaatttgaattatttcttctgataatgggaatgatgtggtaattttgtctctcctgtaaattattttaaagatttgtacgaactcctttggcaggcttgagtgtgttgtgacagcttggcttagatatgcattgaatgtcattgaattcaaactccttaccaacatagttagatagcccataggcattctacttgaccctttcaaggagatctggagatgcaattgtaggggaaaaaagaagaaaagaattcaagaagcaacaaagtgaaagataatttggcttgcagaagagaggtctttctatcacagtaataataatgccaattatatgtccatatatatatatacgcacacatatatatagtatatatatatacacatataactcagacataattctttcatagttctttcttttgtgcacagattcacttctgttataattacatacttatgtgacctatttgttagtaattgcttcagtttcttaaaagagcatcaccttgctgtgcaaagtgtgattgaagcctcaacatctcttgggagtttttttagaattttgaaatcccaggccccacttcagaactgttgaatcagaatccgccattgtaagacaatccccaagggatctgcacgcacgttgcagcttgagaagcactgcagtatcacacatatacacacatattcaacaccaaagagagagaaagaggtcataagctctcaggtggagactagttccatgtatatatgcatagagagaagaacaaactctaccttccagcaacgtaaaattctactcaatcatgtattcaccaaaaaagaaaaggctttctccatataatgtgtattattcatatattggcactcttcagagctcttcattccaccctaatgttatctttcttagataattcacatgacactttgttatcttccaataatttctgtcattgttataagcgaaattattcaggctttatctaagagagtaaatcaaacagtatgcctctctcattccaattctgcaatattttcattctagaatgtctaaaggagccttgaaagagaggagaagtcacctaaggccagctagaggggatatatagcagggaatggtggcaactccactcctcgtagcccagtggggttttttttttttccaatctgtatttgtatgtgagtatcacgtctatgccgattttatgtgtacatatgtaactcaaatctgttcattgtgctagttagaatcttatttccccctcttctactacactctaccctttctctttcccctcctttggcaaccaagacactgagttattaataagcagattggagcaaacattttgatgcactattgtttgatagatttgttggttcattcaataagcattaattgagcacttgctaagtgttaaacaatgtactaattgctagatttaaggatgaaaatgataaaacccttggcctctagagcctagagtgtagttggggagacaaatgggcaaattagtcacacgacaacatattccttgttaaaacagacagttgtgcataagtctgtatacccagactggagatgactctgtttccaatgttgccctgggaaacctcatgatcagtttaataatgatgtttggggtgagaggatactgagacagtttgcttctagcatagtaattacccatagaagtttggggtctttattcaaaagagtttacaggccacatgagccactgtcttgccttttataggatcacatctaagttccgtgtcatataatggccttggccttcttggctttctctgtgctctttgcctgccaataccctaattattgaagtactgtctcccgcagctcctcaaccatgagctgttcccgatcctcccagcagctatgtttctcctttcttcaaacctctttagctttttatttgtactttatttgtactaaattgtatttagagctttggagaacattcttcatagttgtaattagactgtaaagtcctgagaatgtatttttcatcttcgtagccccctgcagtatctagcagaatgcctttaaacaaatgggcagtaaataaatcccaacaaacttaaattaaatttctccaaattgcatatttaattttatagtggcatttactgataacatacattgaaataaaggccagagcataatcctctctgtttctgaatattatttatttaaatattaactttctaatccaattaggtctttcaatgacactttagatctaaatttatttttgcattgttttaaatgtcatcaaatgattcatctcttgtgttttttaatatttttggaacgaacgtgtgaaaatgagcaagtgtcatcagaatatgatgcttgggtttttttaattcaacatttctttgatcatatatttaaagactttttctcaattcctttctggatgtggcctcacaaatcatttcagaagtcaatccatttcaagatttttttttttttttttgcttttttcacttcacaggaagtcaagttcattctttaaaatgtagcaaatgattaagcaaattcaacgaatgatcttcatcaactccgaggtgtttttcccccttgaaaaatttaagttactattatttttttttctttttttttttttttgatacagagtctcactctgttacccaggctagagtgcagtggtgtgatctcggctcactgcaagctccacctcctgggttcacgccattctcctgcctcagcctcccgagcagctggtaccacaggcgcctgccaccatgtctggctaattttgtgcatttttagtagagatggggtttctccttgttagccaggatggtctcgatctcctgacctcgtgatccacccacctcggcctcccaaagtgctgggattacaggcgtgagccactgcgcccggccaattattattattttttttaaacttcacctatcataaatcttttaaaatttcacctatgataaacttcctctgtcatctggggaattacttaaatgcaatgatggccttcaagtatactaccaggcagcctatccaaatcatgaaacagaaaggctcatagaccaaattaaaatacttgaatcacagagtttattaaaatcacagtgagaagcaaacgggaaagatatgtgctaagttaacacgcttagaatagagtgtaagcagactgtgaagattagagtacttgaattctgcagtacacaacattatatgtcttgtctgtctctgtattgcatcagccttcccaattatggtgtgcttacaaggaccaaagttgacttcccaacaagggagtccaaaatgggtggtgcctgattcagtggcatgtggtttatcagagacacagagacaagaatgcatggccacagctgtaacttgccaaaatagcctgatgactagccatgtaattctcaggcagaagacttacggtgctggaataggtatcacctatggatgcctgaattaagaccttgtgaacattaagtgctcatgtgtatttatttgatcttgaatatttagtgcctcttgtatatttggtctcatgtgtatttagcatattatgaatatttagtacccaggtgcctcatgaatattgggtatcttttggtccttctatccctcactatctatgtttagtacacacatgctctgcttgctaactacttatcttctaattaacacattccaagagccaattatgtgtatctctttccactgagttcttcattcaatgacatcaagttagttgcttgaaatcagctattgtgagagcacttacaccacagaaattggcaaatgctacaattagcgccactgccctcccctagagccagttatttgacatttactagcattccactacttacatggcccttcatgctctcactccgtgtgaccactcaagccttatccctctttactgaactctacaatcaaataaaatatctttgtttcttgcttctggccctccatcaaatggctccctctcctaggaacaatctgtctctcctctatcacctttgtttagctagttaataatcccttttcagacagcacctcataaatagattcctgaacatcccaaaccggatctcctgcaccttcaatgtgctacttcagtacatttgtcttaccctttgccatatggtatttcaattgcccatgaatttgtattcctgtttagatcttaagctttgtgaggtctttttgtacttttttgtacttccgtatacctaccacataataaatatttaatgaaagcattaatgaataagtaagtgaatggagtgagtgaatgagtattcaattatgattcatttgtatcaaagtgataacatatacttacagggaaaaggccagagggggaaaaaataaaaaataataatatattttatgtatgaccttgtgtggggaaaggaacatagggccactgcctggcctgcttcttttatgcaaatcctaatgtaaaatatgatcaacgcctggctgggcagaaatacaaaaacccagtactagtgattctcccaaccagataccagctagtacagatcatagccagatttaactactgtgaagtggttaggttagaggtgacctataaggaaatgacgctaatgatcattagcatcatcttggaagcttaaaaaaatgccccagctgtaccccaagccaatgatatcagacttttgtggggaacccagatatcattgtttttaatctttaatgattccaatttagccaaagttgagtctcaacaaaccaagttcttcttactctcatattctcttcttctcgcatagataagaattaacagccagctcttctacatgtttcttagacacatatattgtttcagtggtaattcgttaacagtgcatatgtcagcaaagcatgactgaaaaaaatatctgctcccacacattctgatcccatcttgacactgcatagctgttggcgaaggcaatttcaacaatgaagaagtgggagaaatgactacattttatgtaaatatgtattcattgaaaatcaaaaggacatatgtaatgatattgtttaagattctaaatgaaggacaatacttaagagtcctctgtagtcaaatttctcagcagtaaaaaaacattgtcttttctttacaactattaaccatatggctgtgaaaatgttattctacaagcctttaagatttgaaatctgactttatgttaatacacagaatttaccacacaatcctgtatgatttctaagtagatttaaagagtagctattgctcaccttttcaacataatggtaatgatggtgcaatgtcaattacatgatactctcatgggcgtgattatatgattgttaacacactgaagtgcttatatagacatagatactgatttttatatgtacatatttaaaacaaacaaggacttaaaatggcctgtaaaagtctttctagtcagtctttctggttttggacagagaacaaataatcccttacagctgttaggttggtgcaaaagtaattgtggtctttgccattgcttttaatggtaaaaaaaacgcaattacttttgcaccaacctaatagttatctacttccatctttaacgggccctacccaagactgcatggtatataagtaagaaatgtaaatgaaaatctcaaatgctagatctgcccaggaggggaccactaatgagagaggaaatgttaacgtcccatatgaactaagctcagcttagcatttacccttcctgctattccgctagagcagtgcttctcaaaagttgacctgtaatggaatcttctgaatgcctttttaaaacgtagctggctgggccccatccccagagtttctgtgtcagttggtctgggatggggcctgagaatttgcatctctaacaagttctcaggggatgttgccggcccttgaatcacaacttaaaaacctctgctctgaagaaagggaaagctctctctgctggatttccccaagcctttttcagattttcaggagacttctgtgcggtagcttgcttccttctttccatactactactactaccactactactactacaaatagcaacctctagcatattttcagtactaaatacccagcactatatatacatcacaaaagtcccttgaggaaggtggtattatcatctccattctgcggataaggaaatagataagaaatttgctgaagatcgcagagccaaatgagactcaaacccatgtaacccatgtctgtttgactttaaagcccggaatcttaatttgttccagacaagctcattatgtgctctgatcttcaccactgaaatgttctgaatatgaggctgagggcagcagtgaggttggaaggagcagcccagaggagcaggcactgtgctggtagaatagtagtatggtggggcctgcactccctaataaaagaaggggacaatgactatttcctccttctccaaggtcgtgctgcctcccatttctctgtctgcctggtaagaagcagctctgggccatgtgtggtggctcacacttgtaatcccagtgctttgggaggctgaggcgggaggatctcttgagcccaggaaattaagaccaaccctagcaatctagtgggacttcatctctaataaaaataaaaaacttagctgggtgtggtggcacacacctataatcccaactactcaggaggctgaggtgggaggattgcttgagcttgggaagtcgaagctgcagtgagccgtggtctcaccactgcactccagcttgggcagcagggtgagaccctgtctccagaaaaacaaaaagcagcagctctgaaaagaggatctagcagtttctatatgcaggagagcatttgcgcaattgttcctggggttgaatctgagaaactcacagtgcacattcagatactatttacaatcttctaggaatagtataaatattgtggccagggcaccttcatattgtgaaacacaaaaagacttcagaccttagattatgtgtcgaaagttaggcaccaatgatttttttttccatttgttcttaagtggcaaatctttacattaacatttttggtacttgtctttagggaaatttcttctctgttctgaatgtatatattgtaattcctcatttacaattttgcctgcaaatgcaagtgagtacagatcatccagttatgaaaatgctctgagatttgagtctagctgtttcagctttaagagccctgacctagactttgaaactgacatggttttatatgtatgtggttggaattaaacccaaagcacatcttttaaaactctgaggaacttctgtgccacagctttcgctcagttggtgagattttactttgaaatttaagggatgagtctagtttatatgcaaagaaatgtagggagctttgcaaacccaatcaaatcctttgtgaacagtgtgtgcatctgtttattttgctgtcattttgagtccatgatcctgtatactgttttgtgggcacatattgagggtaatatcaaataccatgtagaacagatgctgcaggtatcctttccatgtcctcttagctttggggtggtagatgggcacatggaccaagcccaaagtgacagggtattaacaggagcaagactcaaccaataagggagagtagatgggtacaaatctcagctttctctcccctcactgggataattttgagatatattccaaagatcctcagagcatccccaacagcattgagccccagttccccagattagtaatctactcaataaatacctcttttttttttttttttcccgagatggagtctcactctgcaccctggctggagtgcagtggcacaatctcagctcactgcaacctccacctcccgagttcaagtgattctcctgcctcagcctcttgagtagctgggactacaggcatgcgccaccacacccaactaatttttgtatttttagtagagatggggtttcaccatttggccaggctggtctagaactcctgatctcaagtgatccgcccgccttggcctcccaaagtcctgggattacaggcatgagccaccacgcccagcccaataaagaactctggattgtttcttccttttcctctcctcctttcctgttccctacagtgtttcctaggatcacctcagtctgctgtatgggaaacccagactgagtcaccataacagacagaggcattgttactttaggactttagtggatatagttacatgggagagagagactgtgtatgtatatataacctttataatattaaaccatgctatactcaaattatttactggccaagatttccaatataaattggaaataaattggatataaatcaagaacagttaaaattggaaatagttaaaatacaaataaaatagctaaaattgggcaaaatacctgacccaatgctttaatatccgattgcataattaaacgagtaaagaggaaaggaaattattagcaactctatatttaaatgcaactgacatccaaggaagtcatgaagaaaactctttgtgttgataaactgaaggcctcttctagcagacttctgtgtttattgttctgttgctgactattttattccaaacaaatgaacttgcttgtcattataccccacccttccctagtacagggcccccattctttgaaacagtaactcattcagttccaaggagaatatgaaaagggagggtaatatataaaagaactgaaatgaaaagtggcctaagtgtggcacatttccattgtggattccatggcaatggagaattgatggcagagcatggtgagagatgtgaagcatcaattggctgtatctccagggaattcctgaagttcagttgccaccctggagggtggcaaatgctctctctcaccttccttgagttattgcttagatgactcaaaacaaaaaactgatgagctataaatgggctgtattatttgtttttacctgctgagtagttcagatatttcaaaataatctcaaacttaacctatggtgtggtttctgtgttaaacaaaataccgtaacttttagttgaaaatactgtgtaagcccacacaatctcttgttcacagataatcttgttgtcaaacattcatgatgacaaaaactcataaacgattcttttaaatatcaagaataacttatgctgtaagtcataatttcataagcatgaatttatgaatgtgttttgtgtttgcaattttcatttaggttgtcttaaaatcatgcgttttagcttaacttaggagaaatatatcttttgtgacaacataggatattcagagaaacgtgaaaactaggtgatgtgttttatgaaagaaggcataaagtatatcaagcataagaactttgaattctatttgtgttttttgtggctttagaaaagattgttctgggaatagagaattccatttgggaaacctagcacatacacagtagcagagttaaaatactgacttggagggttcatttgaagaattctatagaatttttgcatgttgggaataggtttatattcttaaacattgcactcagggtttctattcaaagcaaaaataactttgcatagaccttggccattctttcacattctaaagtaatccatttttttttttcagggtagttgttctcagtcctgattttctgataattcagatcatctttaatttacaccaaaaacttttagaagagtcagataataatttaacataaaatgtaaatgactgaaatatacattttttaaaggagcagatatggaggggtccaatgtacttaactatttgctctctttgtctccttgcattcacgggaatgtttctatgtagttttctaatttcacacaatttcaataatccataccctcctcatttttatgggccttcatgatactaaaaatgttaccagaaattattttgtgttagtctctttgtttagcacattcatacataagttttaacatttaactggcatatttttaaagtaatacatgttttttttttaaaaaaaatcagttatgtttgtgtgtgtgcatattttcttttgtggccaaatgttgcacgccctagtccttctatttaaacaatgagtttacataacaaatgttacatgataaacatgaagacatttagtttgaaaaaaaatgattttctagtttactcatttaaaaaaagctgaagtaaccgggaagaggagtggcagaacatattagtctttttcataatgccatcattaaacaaagatacttaatttccaggcctggtgcagtggcgcagcctgtaatcccagtactttgggaggctgaggagggcagatcacttgaggtcaggagttcgagaccagctttgccaatatggtgaaaccctgtctcaaaaaaaaaaaaaaaagaaaaagaaaaagctacataatttccaaaatgacttcagtgggacctgaggtgagggaataaaggctctggagtaatttcactctctattcctctcctaattttttttctgttcctttataacaacattttcactacttttgagcttgggagttgaggaatcatgaccagaagaaaaggaaagacgggaaagatgttcaagggtgaggatgcttaagaatgacctggcaagcttatgaaaatgcagttgtctggatcccaccacagagattctgatttagcaggtctgtggcaaggcctgcgattctgcattgctaaccagctcccaggtgatgacactcatgctggcaacctatgaaccattgagtggcactgttccagggggcagggcaatgagaaattgaagtcaaaagccccaagacctggtgctacgaaaatactctggttccttccctctcaactgatttacttgtcggtgtgattttgcaaaaatccctgaacttcttaaatcccagttacctcacctgaaaagtatgagtgttgctccagatctggaggctttcagaccatgcaaatcgaattcaaaccatgcaaaccattcaagtcattctagaaagttctgcaaggtgcctcagaggccaaagggagagatgggaagagggattgaatgggctctttccaaggttccctaacccacttgaatactttcatcttttatctctttcatatattccacttttgagtatggtttcatttagaaaataggattttataccaacagatttaaagaaaaactccaagtctgaaaatgactcatttatttaaaactgtatagaacaaagacatttagtgcacaattccaaaaattctctgatccttccacagcatgcccagtatgctgcaagagtgccagcaaacacatgcttactgctcacaaatgtgaaatttaaccccatgcactaggaggtccctagtgtggggtggttttagctaaccagactaagagagtacagggcaacatcgagcctttctctgcggtcatgtctgattcattaaaaatccagctttccccgaagatatattaattaccttctgtttcagaatttgtttttagagcctaattcttaattatatctccagccattgtgtgatttgaccattttggaactaaaaagttatcctatgaaattccacctccaactattgccacactgttagtttgtctatttcatacaccatgccaatcttagcgtggtgctagcatttcattataaccagctttcatttttaataagaccatgtgtatatgaaattgtagacttcagtctttgtatgaattgaaagctattaatcttcccagggttaggttatgttaaacagattgtaatgttcttctttttattatgttatttaaatccccttcatttcatactgcaccaatacatttctactatcttggaataaattaattccagttacgtgatggaaaattttagtgtaaaaatataacctgcagtataattttttctgtcagaataccaactagaactggtatgtttcattctaattggaaatttgagttatcgctttgatttttaacagtgggaaaggaaaatgaagattgatatctttcaatagccgttcattcattcttcattccttcattcattcacgtattaagaatagtctatgtgctaagaacagaaagagtgttagagatatgaagattaataagaccagatccctgcctgcaggcatttcctattctatgtcatagatagggggctattctgtttagaggtaaagcatgacccacattgcctctgacaagaagcataatgtctgtagcagctaactgctggagacaggaggctagagggctgccctggtaattggtattcaagtcttcaagaaaggaaaccagctattccaaaatcagtgggcaagaggaagttgtaaagttaagtgaaatgactaaaatatgaataactaaaggttggaatctggtagaaggagaggagagcatcggtcagcaccttagtttgggaaggtggtgtggccatagtaggctttatttagaaagaagcaattcttaggtaccagctaggtttcagttccttaaggggagaaaactggcaaaatataggcaggtttccagggtgcaaagccacgttctagcttcagctcaggcaaggccctggggtatgaatcaccaccagagtagcccagccaaaatgactaagggatctaagctggttgctaatgaaagaggttgcagctcaaggcagctctgctgacgcccactggatactgggattacattgatttaacacatggaaaccacttaatatggtatgtggcacaacacaattaagtactcataaatatttgcagataatgctgctgccattgctgtttttgtcgttagaagactcgggaaaatcatctaatacaggaatccatctgttggcggggcttgggcttctaatatttgactggttgatttttgtcgacccaatcttaacaatattatacacagccattacttcaggaaaggcagttgtaaagaatggtataaatttcctgtaacttgactgccacattctagctgagtcacctctatatacctcagtttctttgtatccgcagtgaagattaatgacctcatagggttgttattagaatgaagtgaattactacactggacttatttaggacagtaactcgcacatagtgagtgctcaaggaaatctcagaccctgcctgctagtggagggtccagctcctgatacatttgggggcaggtttaaggagttcattgatttagagctgtaagggctgatctttcaccctgcatgtcttcagcaactgtggctggtaaagtccagagcagtcaaaggctgacaaatccttgttagaaatcacaaatgcccattctcacaacttctgtggtgttttccatcctttccctagaatactttctttttaaggcaaaggaaagaataatcactgcagatagcacacagtatttttttgcaacatattttcaaaaattatgatgagaaaagtgtatcattcctgtgaagaaacagcataaggaaaatgatttgagaaagaaacatggttcttaaactgaaacaagtgtcagaaggaatcccagaaggcagaaggaaatatagtaatcatgatgaagtctagagctcacaccggttaacagaatggcagcagcgatattcatctcacgcctcttccatgctgtccctgagtgagcttctgctgaattgcctggctggtgaggattggtttcagcagcagaaggaatgggctgccagctgaaggctctggttctgatcctgggtagggtcagagaaagcaagatgtgaccatcacttttgaccttggtcttgaatttgattccatggaacaacgatattttacaaacccagttgaaggtttatccctttttctattcaacacagggagagtccttagagccccaggaagacttagccctttttcattctaagagtaaaccacatctaggtttccagagatgaaaagaccaggctctgatcttccttctggaagcccttgcctattcaacaagcatgagtattaaatgctattgccttggaatcataattcagttttcacagtttgggctatgtcagaaccattcttgtcaaccccctgttttctgagaacccgaaacctgcttgtttagaattttagaatctacttgactcttacaggggagaaaagatctcttttctcacccatcgctaggttcatggctgaggcacctataatgaaggacaaatcaacaacataaaagcatgcgaatttatttaatataagtttcacatgacacaggagccttcagaaatgacccaaagaatcagggaaaagtgtgtatttttatgctctgatttgaggaaaagtagatgtccagtatgactggacaaaggggaatggtaataaactggggtgaccacagcaaggcctgtttctgcagaacctcctgtgtccctgtgttttcagaggtaaaaattttcctttccttccagtatagtaagggcacctctggtatgatagtctcatgacctgcttcaggggagaagggggaaggggaaggtgagagtgaccatcctgcttctgctgtcttctcaaataccaagctgccatattgtggattttggagtagcgtaacttgaatccttttttttttttttttttgagacggagtctcaccctgtaacccaggctggagtgcaatggcacaatctcggctcactacaacctccacctcccaagttcaagtgattctcctgcctcagcctcccgagtaactgggattacaggcacatgccaccatgcctggcaaattttttgtatctttagtagagatggggtttcaccatgttagccggactggtcttgaactcctgacctcgtggtccgcccacttcggcctcccaaagtgctgagccaccgcacccagccgcatagcttgaatcttatcaataccttaaccaaatgactctgacagttttcctcttcttatctaaattcttgagggtcacccacacttcccaatgtcttttgaaacttgacctcttttctgctgaattgaggaagatacctgatttctttaacctcaccaaattcctacttcttactgttgttcattgctggctgaaaatttactttggcgagttcaccaagaacatacttatcggttcactgtttatatttgcactcaagataacacttgaggccctgctactcaaagaatttagtgacaactttcttcatcactctcatatcttatctgtcatcaagtctttttttcctcgtaaaaatgcttttagctctttaagtatgtttcatatctataatagctaagataggctaacagctataatatattaaacatccaccaaatggactattaaaatgacttaaacaaaatagaaatgtatttctttctcatgtaaacagtctaaggtgaattcatgttagttggtgttggatgtgtgtgtgggaagggaggggtgacacccacataattattcaagaatacaggccaggccaggtgcagtggctcacacctgtaatcccagcactttgggaggccaaggtgggcggatcacctgaggtcaggagctcgagaccatcctggccaacatgatgaaaccccatctctactaaaaatacaaaaaatagctaggagtggtggtgggcacctgtaatcccagctacttgggaggctgaagcaggagaatcacttgaagccgggaggcggaggttgcagtgagacaagatcatgccactgcactccagcctggcgacagagcaagactctatctaaaaaaaataaaataaaataaaaataaaaaataaaaaataaattaaaaaaaaaacaggccagcaagggtcttccatctgcaatagccaattgccgaggttgccctcctgaagatattcagccagcccaaaggggaatgagctagaggactgcacacggaggcgtcccatgtcctttgactcaaccttctactggctagaactctgccctgtggccacatgtaacagcagaggggctggaaaatgaagtctagctagatacctaaaaagaagcagagaaaggtttcaagagcatttagcaaccatatccaccttattcatgccctgccctctattcgcagtggccccgcagcactgctcaactagcttgctgcattggcctcttatctcttatctattgccttagatccatctaaatgctctgctactcttatgcctggaatatgttttcaagatgtgactaatcctctcacagcttgaaggataaaaggtcaaactgctctggtgaatgcatgatgcctggtcacctctgtagccccatcttccctgacactttcacagacagtattccctttactccaacctgtgggagtattttctaattcacaataatagcaggaaatacaatgtggaccagacacagttctgagcagtatattaactcatgcatttcttacgataactttataaggttgacagtagtagtatccctatttcacagagaaggaaagagatacagataagtaatttacatatgatctcacagatagtaagtggtacagcttgagtgcatatgactcaaagggtagaggttctagattcttaatcactgtattgtactacttctcccaatgttatcgtacatgccattccgtcttcctggaatacccttcgtctttcttcatctaacttccactcaaactttaaggatcaatttaagcatgccttattttaggtagccatggttgacatcagcctaatttaattgctactcatctatgtccccatagcgtcctttgcattcctctatatctctctgctatagcagtaaatgtaccaccattccgtaaaatccttaagggaatgtttagttttatgttcccaatgccagcacaatgtccagaacagtgttgtcccatagaaatgagagccacctatgtaatcttaagtattctagtagccacgttctttaaaagtagaagtgaaactaatattttattgaccctgatatatccaacatattattatttcaatatgtaatcaataaaaagtattaataaaatttgctttttccattctaagtctttgaaatctggcatgtgtctttcaattgcatcccatctcaatttggacaccgtattttcattgaaaatatttggtctcacctgcacacgtatgtttattgcggcactatttacagtagcaaagacttggaaccaacccaaatgtccatcaatgatagaccggattaagaaaatgtggcacatatatatcatggaatactatgcagccataaagaggatgagttcaagtcctttgtagggacgtggatgaagctggaaaccatcattctgagcaaactatcacaaggacagaaaaccaaacaccacatgttcttactcacaggcgggaattgagcaatgagaacacttggacacagggtggggaacatcacacaccagggcctgtcgtggggtggggggaggggggagggatagcgttaggagatatacctaatgtaaatgacgagttaatgggtgcagcacaccaacatggcacatgtatacatatgtaacaaacccgcacgttgtgcacatgtgccctagaacttaaagtataataaaaaaaaaagaaaatatttggtctctatttacatttcataaactttatagttgaaaaaagaagattcacattcctaagttgttccaaacatacacaaaagtttttcaataactgaaccaagagtcaatttttaaatttatatttaaatttaataaaatggaataaaaatttgttaaacttcagtctctccgtctcactagcctgatttcaattgctcggtagctacctacagccagtggctcctgtgttagacagagcagcacagccctagaacacagtagatcctaaatcgatgtttattgaagaaattaatcaatgacagtgtagaaaatttgcagtgattatgtcagaatcaatagttctccacccattttctcccacactctcaaaagggccaagttttatatcaccaaatgatattcctcttacttctttctgagcagaaacagttttggaaattaagatctttttcaaattttccagactcggcattttagcagcgtttctatttgtaccaacaatgcctttctacctattttccttgcttcttaataagttaactttgtgcgaaggtcattttgtaggtcagtgtaatattgtgcattaagggcttctaagttttctggtattataagaactccttggtttccttctacttttcagaatggaaaatcctcagagcaattttcatctaaaagtgctgcatttaggttgtttcacaattccccaaccctgagtcaaatataggttggtgtatgagcagcagtgtctcttggctaatcaagagcgtctccttttgctacgctcagtgttagagaaatggagaaagtcagctgggtttagagattaggtgagagactcaggcatatcctttgataagtcataaatcatttcctgtttagaaaagcacatgtttagacacccataaaatctccaaatgaagggtgttttacttttccttcaaaatctcactgggaaaaggtacttctgactttccaagtgaataaaaataatgactcctgattaccatgtatgtttaaactgatttgcaaagcaagtgaaaaagagtctagtgagtagtgataagcatcttttagacatcagaagatgtactgatttaaaggtccgtatcattttataactagtatctattgagattcaaatggttattactctgtgtgaatctgtcttttctaattgtttttacttattttagaatatcgatttgtgaatattaaattcctaagttttccagcaatccagtgtttgttttggatatccagcctggatgcagaatagctgcagaaagttatcacaaattgatctctatattctgtttccgagtggcaattgtcaaaaatttggggtcatcggctacccctcccacccctaagaagttccttgtacttcctctttcaaaacactcacatcattgttcagtgcctcacttctctactaaaatgtaaccaaccacaaagatagggactatgtctttcctgtttactggtggattctcagtatctagcaccatgaccaatgttaatagacgttgaatcaattccagttgttacctcttcacactgggacaaaagtccttgcaagtattctgctgccatttgtatagattcaagccaaatatgtctcaaaacgatattacagatgatctcttcgttgttcctctgacaatttctttcccccctgcattgcttaacttgattgacaatgacccctactacttataacatgtgccttttaggtagtgcacttggcactacattttatgtgatagttttatgatgctaaagactatttgctgtgatgatgctgtgttctcacatggcatatccagatttatttatgctggtgaccaaaggcaggtagttaaccttgaaaataggttaaaatttgaaaggcagcaaatcttagggctagaatttataatttatctttaaggaatcttgaaaccaggtgtgaaggaagggacgtaggctagaagtacagaaacctgggttctgctccagcactgatgttaagagcaagttgcattgcttttctggaccttaattttctcttctggaaaatgaatagattaactggaacaaggaaggaaaatacgtgaatggcttccgtttctgtctcgtttacccctgaaagacatggctagtcagtcagctctgtatcagagcacttctcaaggcaatgctccaggtagctaccactcactaatgagagttagcacataggtaaaacctctttgtcatctctaggctacttcatgtttaagatactctccagctttaaaattctaataactctattagactgaaatttaagaatacgagaataatcatccctcaccatgaagagagagtctgaggaaaaaataatgagaacgaataacccttctcttttactacaattcaggactgccatgaagagccgtccagattgtgaaacatacaactcatgatgtgaatggtacttctttgtttttctcggtgtacaacttgcacagctgttcatggccctctgcttccacaaattcatttctaaatagctgtacctcagttctttgacttctagtatgtctaatttaatacacatttctagatttacgatatataagaaatatctccatgaaggaaaaatgtaatagcccatgcttttcattataatagaattttatgaaacaatgtcttttaaaaacagaaacatatgtactactacttcgcaggacattagcccttgtatataaatcaataatacaaaaaattcaaattaccaaggattagaaaagactgctgtgggatatcttctggtgcaagcatacagttatttatccatttctttcatgaatatttattgatgttccaaacattaggctagacactagagacacatcaataaataaaggaaataggtttgatctctatcttctttgatctgtagtttagtgggggaggaaggaaattaaacaagtaactactacaggttgaacatccctgatccaaaaacctgaaatccaaatgttccaaattccaaaactgtttgaatgctgacatgacatcacaaatggaaaactccacttctgacctcatgtgacaagtcacagtgaaaatgcaggcacaccacatagagtttattcagcatccccaagggaagaaagatcctctcagcccccgttagctgtgatatatcttttccacccacacccagattccatcatacaagcaaacccacaaaaggtacgaaaaatggcacatgtgcgggctagacgcgacaacggcaggtaccctacaatgtccagcatggggccaaaacctacgtgcattaatcactgtgtttgctggtatattctctggtggtgtcaagatattgttgaaaatgccctaaaggcctgcatgatatccatagggtaatgcaaatattccaaaacctgaaatttgaaatactttcagtcgcaagtattttggatatgagatattcaacctatagatggtaagggtattactatgatagtgctacgggtgtacatcaaggtaattgaccctggcttggcaggatgcagaaggctttcccaaggaagccttacctcagctgagacctgaagagaagcaggagttagacaggtcaagttggggatttggaggaggtggagtcccagcagatggaatactatgcataaaggcctggaagtgagaaagtcatgtcatgttatttcaagggactagaggaagcttagcaaactggaggcaagaagatagcttcagcacactattgaaattgtccaggtgagtaatgatgatagtgtaactaagttgtgatacctaggtatgtgagctgaacctatggagaaatgttctaggctagagaatctttaattggatatttaattatcagtatatacgtaattaaaaccttgcaagggtttgaaatggttcagagtaaagttcgtagatgagaagagggcctaggagtgaacccaggaaaatggcaaagtttcaggggtaaataaagaaaaataagctttcagtggagacagggaaatttgcagttcagtagataggagacagactaggttcgtgtgatgtcacagaatccaagggaagagaggttttcaagaaaaagtaacatttagaggtgtcaaatactacaaaagcatcatgaaagataagaccaaaatatatcctattaatttagcaacaaggaaggtattgacaacctttatgcaagtgatttcagtgttgattatggagaactcagtaattacttggtggtaactaaagaaccaagattgcagtacgttcaggcatgattgagaattgagaaagtgggggagcaagtgtaaaacaattattttaagacttttggctgcgatgggaagagagaaagggccatagtagcagaagatggatgtaggggcaggaagaacacactcttaaaagggtagtgacttacacatgtttaaatggcaatgagaagaagatggtagagagggagaggttgaggatgcaggagaaattagagataatcaatagcacaggtacttgagaaggcagaaagatgaaatttagaaattagcttcagataggaaggaaagtacagcttctattacaacatcaggggagaagggaaggaggatgggcatagctactggtagttttgtaagtttggtgaaaggttaagtaggattgttgtattggatttattttttattgaagtggaagctgcagctaaatgcccagtgatgaggaaggtgttggagtctgagatttaaggtgagtggcaatttgaaatagctgctctaggatcctatttaacagagaaaatgttgagtacacaatcagtgagcagttttaagtccactctattctgtttgcagtttcaagtacctttcattgcttctaagtttatgaaaactggttcacaatcttcttgtgcttcttatttctacctcttttccttctgttttctcacctccccagtttaaacagtcccgaattttttacaattaaatatacagcaactgccatgaaatctactgataaaagatactgcaaaatcagtttgggattgggttcattagcttacttattattatcaatcctaggccactaagcaaccttgcataaaatgcataaaatgaggagattctagtggaggatagttttcaattatctcattaatttcaggccatgtgactagtccaaatagatattataggccaagaagagcctatcttgagattttaactcccaggataggttttctacctgatcaaaagaatctaataactattcaatctcttcttaaatggtttggttttctgtgcaaacagttttacccttttagctgattttctaggtgttaaattaagaaaattctctcagatacttgttcatcatgtactaggatccctgatgtgttcagagttgtccaactttcaaagggctttgcattcagagtacctaatctaaaccctgatatcattcttttataacagaaaaccccggattagactgggacagtgtctgtcatgttcatcactgcatctccctcagtatttgtagaatgaatgaagggacaatggcaaactatagtcctaccatcacacttttggtagtgaggagaactgctgtaacttggaagattggagggggaaaaggtggctaaaacaatcatacagtaaactgggctgctatcaagagaaaccatttgtcaattttggcttttgttgccattgcttttggtgttttggacatgaagtccttgcccacgcctatgtcctgaatggtaatgcctaggttttcttctagggtttttatggttttaggtctaacgtttaaatctttaatccatcttgaattgatttttgtataaggtgtaaggaagggatccagtttcagctttctacatatggctagccagttttcccagcaccatttattaaatagggaatcctttccccattgcttgtttttctcaggtttgtcaaagatcagatagttgtagatatgcggcattatttctgagggctctgttctgttccattgatctatatctctgttttggtaccagtaccatgctgttttggttactgtagccttgtagtatagtttgaagtcaggtagtgtgatgcctccagctttgttcttttggcttaggattgacttggcgatgcgggctcttttttggttccatatgaactttaaagtagttttttccaattctgtgaagaaagtcattggtagcttgatggggatggcattgaatctgtaaattaccttgggcagtatggccattttcacgatattgattcttcctacccatgagcatggaatattcttccatttgtttgtgtcctcttttatttccttgagcagtggtttgtagttctccttgaagaggtccttcacatcccttgtaagttggattcctaggtattttattctctttgaagcaattgtgaatgggagttcactcatgatttggctctctgtttgtctgttgttggtgtataagaatgcttgtgattttagtacattgattttgtatcctgagactttgctgaagttgcttatcagcttaaggagattttgggctgagacgatggggttttctagataaacaatcatgtcgtctgcaaacagggacaatttgacttcctcttttcctaattgaataccctttatttccttctcctgcctgattgccctggccagaacttccaacactatgttgaataggagtggtgagagagggcatccctgtcttgtgccagtttttaaagggaatgcttccagtttttgcccattcagtatgatattggctgtgggtttgtcatagatagctcttattattttgaaatacgtcccatcaatacctaatttattgagagtttttagcatgaagggttgttgaattttgtcaaaggctttttctgcatctattgagataatcatgtggtttttgtctttggctctgtttatatgctggattacatttattgatttgcgtatattgaaccagccttgcatcccagggatgaagcccacttgatcatggtggataagctttttgatgtgctgctggattcggtttgccagtattttattgaggagttttgcatcaatgttcatcaaggatattggtctaaaattctcttttttggttgtgtctctgcccggctttggtatcagaatgatgctggcctcataaaatgagttagggaggattccctctttttctattgattggaatagtttcagaaggaatggtaccagttcctccttgtacctctggtagaattcggctgtgaatccatctggtcctggactctttttggttggtaaaatattgattattgccacaatttcagagcctgttattggtctattcagagattcaacttcttcctggtttagtcttgggagagtgtatgtgtcgaggaatgtatccatttcttctagattttctagtttatttgcatagaggtgtttgtagtattctctgatggtagtttgtatttctgtgggatcggtggtgatatcccctttatcattttttattgtgtctatttgattcttctctctttttttctttattagtcttgctagcggtctatcaattttgttgatcctttcaaaaaaccagctcctggattcattgattttttgaagggttttttgtgtctctatttccttcagttctgctctgattttagttatttcttgccttctgctagcttttgaatgtgtttgctcttgcttttctagttcttttaattgtgatgttagggtgtcaattttggatctttcctgctttctcttgtaggcatttagtgctataaatttccctctacacactgctttgaatgcgtcccagagattctggtatgtggtgtctttgttctcgttggtttcaaagaacatctttatttctgccttcatttcgttatgtacccagtagtcattcaggagcaggttgttcagtttccatgtagttgagcggctttgagtgagattcttaatcctgagttctagtttgattgcactgtggtctgagagatagtttgttataatttctgttcttttacatttgctgaggagagctttacttccaagtatgtggtcaattttggaataggtgtggtgtggtgctgaaaaaaatgtatattctgttgatttggggtggagagttctgtagatgtctattaggtctccttggtgcagagctgagttcaattcctgggtatccttgttgactttctgtctcgttgatctgtctaatgttgacagtggggtgttaaagtctcccattattaatgtgtgggagtctaagtctctttgtaggtcactcaggacttgctttatgaatctgggtgctcctgtattgggtgcataaatatttaggatagttagctcctcttgttgaattgatccctttaccattatgtaatggccttctttgtctcttttgatctttgttggtttaaagtctgttttatcagagactaggattgcaacccctgcctttttttgttttccatttgcttggtagatcttcctccatccttttattttgagcctatgtgtgtctctgcacgtgagatgggtttcctgaatacagcacactgatgggtcttgactctttatccaacttgccagtctgtgtcttttaattgcagaatttagtccatttatatttaaagttaatattgttatgtgtgaatttgatcctgtcattatgatgttagctggtgattttgctcattagttgatgcagtttcttcctagtctcgatggtctttacattttggcatgattttgcagcggctggtaccggttgttcctttccatgtttagcgcttccttcaggagctcttttagggcaggcctggtggtgacaaaatctctcagcatttgcttgtctataaagtattttatttctccttcacttatgaagcttagtttggctggatatgaaattctgggttgaaaattcttttctttaagaatgttgaatattggcccccactctcttctggcttgtagggtttctgccgagagatccgctgttagtctgatgggctttcctttgagggtaactcgacctttctctctggctgcccttaacattttttccttcatttcaacttggtgaatctgacaattatgtgtcttggagttgctcttctcgaggagtatctttgtggcgttctctgtatttcctgaatctgaacgttggcctgccttactagattggggaagttctcctggataatatcctgcagagtgttttccaacttggttccattctccacatcactttcaggtacaccaatcagacgtagatttggtcttttcacatagtcccatatttcttggaggctttgctcatttctttttattcttttttctctaaacttcccttctcgcttcatttcattcatttcatcttccattgctgataccctttcttccagttgatcgcatcggctcctgaggcttctgcattcttcacgtagttctcgagccttggttttcagctccatcagctcctttaagcacttctctgtattcgttattctagttatacattcttctaaatttttttcaaagtttttcaaaagcaatggcaacaaaagccaaaattgacaaatgggatctaattaaactcaagagcttctgcacagcaaaagaaactaccatcagagtgaacaggcaacctacaacatgggagaaaatttccgcaacctactcatctgacaaagggctaatatccagaatctacaatgaactcaaacaaatttacaagaaaaaaacaaacaaccccatcaaaaagtgggcgaaggacatgaacagacacttctcaaaagaagacatttatgcagccaaaaaacacatgaagaaatgctcatcatcactggccatcagagaaatgcaaatcaaaaccactatgagatatcatctcacaccagttagaatggcaatcattaaaaagtcaggaaacaacaggtgctggagaggatgtggagaaataggaacactcttacactgttggtgggactgtaaactagttcaaccattgtggaagtcagtgtggcgattcctcagggatctagaactagaaataccatttgacccagccatcccattactgggtatatacccaaaggactataaatcatgctgctataaagacacatgcacacgtatgtttattgcggcactattcacaatagcaaagacttggaaccaacccaaatgtccaacaatgatagactggattaagaaaatgtggcacatatccaccatggaatactatgcagccataaaaaatgatgagttcatgtccgttgtagggacatggatgaaattggaaaccatcattctcagtaaactatcgcaagaacaaaaaaccaaacaccgcatattctcactcataggtgggaattgaacaatgagatcacatggacacaggaaggggaatatcacactctggggactgtggtggggtcgggggaggggggagggatagcattgggagatatacctaatgctagatgacacgttagtgggtgcagcgcaccagcatggcacatgtatacatatgtaactaacctgcacaatgtgcacatgtaccctaaaacttagagtataataaaaaaaaaaaaaaaattaaaaaaaaaaaaaaaaaaaaaagagaaaccagtgctctattatctaggtatataccaaggttacccactgcttgactctcattattagccttctttgatgttctctggtacttgatgtctttcataactaatcaatgtattaatgtatccaatcatttactcgataactttattgaaagcaaaagcagttgcataccagctatcaagctggaagtgggagatacagccgcagacaaggcagatatggtcccagcccttaggagctcccagagtagcaggaggtttccccttccagtgtcttctctctgcttttcttcaaaaggaaaaggctgatgtgtataatataccatatctctttgaagttctctgattatggattttaggtttaaaccagttcttcatccatgactttataaattgaaaatccaggattttgctgtgttgttgtgttcttgttttgttttgatgtccctgttttctctagatacagttagaaatgtctaggaagaaatttttggttagtatgggagccccacaaagccatttttttaaacataaaatctgtattacatatcaggtatgaaatacagggggaatgaatcatttctccgtaaaggaaaatttaaagtaaatttcaggaaagtgaattctttcccgtttgcattaccgacagatgcagaaactttaatcgtcatttgctaagagggatatggcagataatacacaatagatgtcgtagcaacattcactcgcattctttttttttttttttaaagaaatctttctttcaagaagctattctaggatctttctcatgacagtgtcctagttcttatctttgctacacacaggctcacaaagtgttttctttgaagggcattttgttattggccctcttttcatttttcttttccgtagcaaacagaaccgaaggtgtttactccccacggtgagagggcacctgggtgcacaaacagtggtgtgaaccactggcctttctctgctttccgttccctgaatgtaagaaacaggtgcagtgatcaattcactgcgtgcagtgaaccccaggcagaaagagaacgtcgtgtcacagaccttttgttacttggagagaatgagcgggaagaaaggctgcctctgctgctactgagacccttttgcccattttattgactgctataggttcatctatcctaatttgtctccggctgtcccagtttatccctgttattcttgtgttactttactttactatattttattttattttattttatttattttagagacagagtcttgctctgtcacccaggctggagtggagtggcatgatcatagctcactgcagcctcaaactcctgagctcaagcaatcctcctccttcagcctactgagtagccaggattatagctgtgcaccactatgcccacctaattttttttttttttgaaatggagtctcgctctgtcacccaagctgcagtgcagtggtgcgatctcggctcactgcaacctccacctcccgggttcaagcgattctcctgcctcagcctcctgagtagctgggattacaggtgcccaccaccatgccctgctaatttttgtatttttagtagagacagagtttcgccatgttggccaggctgttctcaaactcctttaactgtttttttatttttatttttaatttttaaaacatattgtagagataagagtcatgctacattgcccaggctgatctcaaactcctggcttcaagcaatactcctacctcggcctcccaaagcacctggattacaggcatgagccagtgtgcctgaccctgtgtgattattattagcatcctggacactctcaaaagtgttcaggtttggacaatgaactataggatcaccctaattacatgagattaagagtagagaccttgaccaccagaaatggtcaatactcaccatatattttcttcctgatgttagaacctggtacttttgggaaatgaaattgtacatgagatatatgcagaatgggcgaagggagcgaaaagatttaaaaaattaagctcgatttattgagcgcctcgagtgcgctcagtgctgttccaagtgctgacagcagagaggtaagttctgttctccagtgttcacctcacacgtgcaagccaggtttgaaaacacactgtctttccttagtatccctccacccctccatgtgactatacgtatgtatcaagtttgtgatatttcacttctgggcttcttttcatttggaaatttaatgtcagtgtatcatgttttaattaataggacatcatgttatgaaactgttgaatcgaatattttccctaggcatcaaattacttgtcagtggaaatttgacatctagatatgagggacaaaagagatgagaaaaataatagtaaagtgttcctaaaggatgctggtatactgtttaggtattttaatgcactgttacaacctaaagtgtcttgtaaagtatgttctttagaaataaaataaataaaacaagacatctctccataggtacaaatccacttgccttcctcaattcctatccttctgtgatgggaaatctctgctgtgacaaagaaccatgttaagaaaaccataaagttgtattgtttgtagatttttttaatgactaaaggaagatattgcaagtagtagaaacaaatagaggaggtggccctgaaggtcaatataacggagttcactgcagaaaagagaaactactctaggtacgttagacacatatcaaagttttggaaaggctaaagtagcaggttttagacttggcttcgaggacagatttctaaaactatatagaactgatccaataagaaactaccatctccggggtaccactgaagcaatgatttcaagaacatactttgtaaataggaactaggaaccaggaggttgaaatctagacgctaccacttttgaagctgctgttagcaactgcccttctccagccaggaagctggagaaagaactttggaactctgatgtaggaaatctcatgtttctttgactaagctcgccaacagaaatagccaaaaggggcagaaaggtgacctatgcctcacttccactttccagatctctcacaagtatacacatttggcaaaacgttgccagatttagcaaataaaaataatgcatgcaacatacttaacactaaataaaaaaagattgtgtagaaaatttaaatttaactgggtgccttgtattttatctgacaaccctaacttattatatcctaattcataatcagaacactagctgcatggaagtctggcaaatacagtttttaatttccaacctgtccaactggaaggatggtaagtagatttaggtgagccagttcacagtattaaccaaagtagattgcctaccaagaatagctaaagcctttctgcccccagacgcttatgctaccatctgaatatttttactttgcattcttatattcttggaaatcctatcaatctgtgattcagattggtttggtttaactcagcttccccttttttttggagacagggtcataccctgtcacccaggctggagtgcagtggcacaatcatggctcactgcaacttcgacatccctgggctcaggtgatcctccctcccacctcagcctcccaagtggctgggactacaggcacgtgccaccacaccccgctactttttgtattttctgtagaaacagagtttcgccacattgcctaagctggtctcagattcctgggctgaagtgatccacccaccttggcctgacaacgtgctggaattacagatgtgagccaccatgcccagcccctctttttaaaatataaaaatctcccagaatgtgaaagttgtcagtctatactttgggaataagattttcaacagatagaagagaatgaggattaaaacataaggaagtttgggagtagaaaatatgggcaccagaaggtggaaggagagagcagatgcccatttatatatctcctttgttgggtgttggacaaatccaggtcttaaaataggaagtatttcttttccgtacttcttgaatctttcatatcccaaaagatgcatatttcccaaatcatataacccaaagtcatgctatcaaaatgatataaatcatccatggtataggttaaatagctatatatgtatatgctggtctgagacatgtatatgactattgtgtccatggaaatttgagtttggggttctggaccatttatttgcaagtgatttttggttagagaactctttgtaagttggggattgcttttacttattttatgagtaaagatgtcaaaaggatgactgctaaatttgcactgtgttaattcactatttagtgagaagaaatattagactagctatgaaaagtaaaactgcctctccaaaaagtcaaagctgatgaaaaacagtcatacaagcacaatgccgctcttcggaaacatggaaacactttttccttcccaattttccctcagattttctcttccgcatttaaaacacttgggtggttcaagtttctaggctaccactgattgtaacagcaaacagtagcaactggaagcagtgggatgttgggagaagtaatagaggtagctgctacccaagttatcctggaggattttccatggcaatgaaatcaggtagtagaagcttggctaactgagtgtaagcaaacagttctactgagaatggtgttgtcttttcaatccgtttatctgtgatggtgatagtgtgaaacaggggaattttatccaaggtttaaggaaggttatttggttaaaagaggatattgttacagtgaagtcaaactttccattaactttttgctgtaacaacagattgaacgtagcatttcaccgtcaacgagtaaagtgaaatttacagattaacttatgtgcctcttttaaaatatatcagatttctaaattgcttttatttcagaggtatgggaggttcactttctctttgaaagtgtacattatttttctagtgtcttacatctgcctacaaagatgttattttacttgaaagcacagtaactatttgatgagaatttgtcagcatcagtaaattaaagaccctcaaatgatttctactaattatagtttaattccgtacatttaatgatattttaaaacacatgagttatttcataactcccaacatcacaaggataaattttattctacaaacaaaatattgtgctaaatgaaatagttcatttaggcaaagaaaggagcacagaaaattagtggaactctctgctgtaagtaacgtagacattacatggcatattgagtctccatgaatattgtcatgttatgttttaaaaaggtgatcgaacatatggcatttaaaagttccaagtcctcttttaaatgcttcagaatctattatttaatgatcatcttggatctcaaaactgatcttttgaaagattttattcgccccatgtgttaatatgatttccctgtcatatgatatgattatctatcaatacttaaaaccagcagccaagtaaaaaatcagttcatatcatttaatgaatactatgagtcaggatctgggtaggcaagctattttcgggtttgagtagttccaaagcttaaaaatcttatattgattttacagtgaagaagaaatagtcttagctactttggaggtttcaaacattgactactcaaggagtatttccttgctttctcaggcaccaggcagtttttcaggagcaagcattcatccattcagggaattgtaacctgtagtttccacttttctagcaatcacacttaaaaccatgagagtaggccataggacataaggagctcagcttctcagggcaagcacatcctttcagctttcacctgtccgtttgttagtgttcacttccgtgctcaaggagtttcttgttgcctctgagttctaagagacagaacgaagggagaagggtgcagaagtctaacgcatgttcatggacttatctctccaataaagagcttgttttatcttcttttatttatttattttttctaatgaagccattagcctcaaacaaagccatggaatcttatcagagtgaaaccggggtcattccataggctggctgagtgagagctccatggcacgatgatgtatggtcactgcacaacaacgcctttgccacaacacatgtgccttttaattacactttaaatctcatttgaagagatgttatcattatggaaattgctctgtaaatgtgcccaggatgagacccaataaaagtttgctgagaagaattgaagacagaggagatgaatcagcagctaaaacattaccatcagacagaattttcttggctgtaggcaaaacagcccatgcaataacagaaaatcttcattgactcagaggcgtattttccctagattattatggggcactcctgcctgtagcactatcacttctttgataagctgaaggaagcgttctgctctccagctcagcgggcctttttctccccaacctcagagccatcatttgaatttatagttgccaaaatgaataatacagtattgcccttgtgttcctgacttcatgcatgcatgcagagcggggttaaggttctttaaatgaaagattgccttctattcatgcaataaagaacacctctgcttcctttccagggtcatttaaaaataactataccgctgggctatggaaagcacataagaaagattcttagggtaaagtcaaaatgctcttttctctacaacaggcattgtctcatatctttgtgtagcacagctgatttgaagttttcttttaagcacattcttaattatcttttcctttgatcttgaactgtttccctgggctaccagacagagagcctagagccctacctccgctttccccgaggtgcaaactgctccgtccttccacaggcaggcccctggctgaatgcacccttttctccatggttacccacccacctctctgttatttgttacttcccaagtgaatggcaggttaaaatgggaaaaggtcaggttatctgaatgtggttagagtgaaatgaatttcctcattgcacccaagaactgtcctttgacaggtctccttccccaaatcgggtcattttgtacgtaggctcactgggagtaattctaagacaactaaataagtaaaatcacattttggtgccattttccaatgtattcttcttcttgggggttctcctttaaaatggtactggaaggatacgttgtcttcattaatccattgtatgtcccgggggtggaggtggaggtggcagtagcagaagcccgtgaagtaataggtcgtattttgtgtttataaatatttctgcaggtttttgaggagaagatccatcattcttataaaggcattcatgacctccagaagattaagggctgttatgctagaacagtgtttcattcttaaaatggggtctctggactagcagtatcggcatcacttgggaacttctaagaaatgcaaattcttgagttctaccccagacatacagaatcatgatctctcagagtggagcccagcagcctgtgttttaatgagccctctgggtgattctcaagcccactcaagtttgagaaccactgtactaagggaactactgatgcatgatgcaagttcacgctcacaggcacgtgtgaatgacacaaagaacacagacgcctgagagagcaagaaagacaacatagactgtctgactccctgctgggcccttctttaccgcccctatttcaggctaccatgcccatgagtggatgacacgtaccccccgacaaaggtcaacaccactctcccttccacaccctatcactaagtgacaggctaagcctatgttaaactgctcacatctccttggaaattcaacactttaataataggtagcattatcacccccatcttcttctctaagccagaaacccaacttgcctccctatatgttatccttgcattcagtcagtctctaagttgtattcatgatctctcaaaaatatctccctttttctcatcctgtgtctattacctcagtttagatctccatattctcttgcctctaatgttcttgcctctaatgtaccttttcactgccaccaagatgatgttaccaaaaaatcttaaacagattagacatcttcacaggataaagtccaaacccttagcttgatacacaagccccttcacaatccaggccctccttcctgtgcagctatatatatatatatatatatatagagagagagagagagagagagagagagagagagagagaaattttgatcttaccactctgtctctcttcccgccatgggtcttcccctcttccctccggagttacttagctctgatgtgtattcttatctcgtcttatcttcaacttcattcatgtttttcccactgcttcaaatttcactctcccacttctcccctggccagctgctactcatccctcaagaccctgatcaaatatcatcacttgtatgatggcatctgcaaatcttggggggcaaggctaattgttctttgttcccacagggctgtgttccagtttaacatgatcacatgttattttggttcatttatttgcttaagactttttcagaaggctatgggctctttaaaatagagaacttacatcttgtagttttaagagtatttttagtaaaagtttagagtgacccccatctttctgccagcccacaaaaggaaaacatcaaaaagtgaatgtgtaaaaggaagagaactctgacaaaaccaggcagaaaggtttttcagcaagtctttttattttctgttcaggataacattaataattatccacgttggtttctcattctcctgttggtgaatatttttctgctaaatttaaaaccgtatcacaaactcaagcagagatttacaacatttcaacagcttttctacccctgccttagaagggtggatcaaaaacatttgtccatggtaaagcactatggacatgacttagttaacaattctctgtttgggtcaccatgaggcttcttcgtttatactcagggtcagcgacaatgctgatatgcagctacaatttctcatttcttactcagggtgttatgaagcagatttccactgttctttaatcgttattaaaatgtagtccaggtgcagtggctcacgcctataatcccagcactttgggaagctgaggcaggtgggtcacataaggttaggagttcgacaccagcctggccaacatggtgaaaccctgtctctactaaaaataaaaaaactggccgggcatggtggcaggtgcctgtaatcccagctactcaggaggctgaggcaggagaatcgcttgaacccaggagggggacagaggttgcagtgagccgagatcacaccattgcactccagcctgggcgacaagagcaaaactctgtctcaaaaaaaaaaaaaagtcattctcatgtaaaaattcttgtaaaataatctgtaaagtcatcctcttatctgttctagttcttcataagacttatataacatgtcatatgggcatggaaaggcctaagccttcccaaaccttgctcttttggggatgattttccaaatgtacttgttctcagttgaaaagagcattgcggccgggcgcggtggctcaacgcctgtaatcccagcactttgggaggctgaggtgggcagatcacgaggtcaggagatcgagaccatcctggctaacatggtgacaccccgtatctacttaaaatacaaaaaattagccgggcgtggtggcgggcgcctgtagtcccagctacttgggaggctgaggcaggagaatggcgtgaacccgggaggtggagcttgcagtgagccgagatcgcgccactgcactccagcctgggcaacagagcaagactccgtctcaaaaaaaaagaagaagaaaagaacattgcatcatggcacaaggacacaaaaaataccctggacctgcttcagtgagatggtctaagggtctctagcatcttctgaactgaactgaatgctttgggaagaattaatagatacacgatgtatattagttcgtttcacactgctataaagaacttccctgagactggggtaatttatttaaagaaaaagaggtttagttgactcacagttctgtgtggctggggaggcctcaggaaacttataatcatggtggaaagcaaaggggaaggaagcaccttcacaaggcagcaggagagagagagaaagagtgaatgggaagagccccttataaaaccatcaaatctcatgagaactcactcactatcacatgggaaaacagcatgggggaagccacccccatgatccaatcacctcccaccaggttcccccggattacagttctagatgagatttgggtgaggacacaaagccaaaccatatcacaatggaaagctcatgaatgggttctaagaatgaggaaatgtaccttagcattttgcctacttttcctttatgacatttttttcccggcaaatatgccaaatattacctacctttacatcagtgtccacatgcatatcccctgtcttcctccttttcctcatacattaacaaaagagtaactttgttttctccccatcactgttcaccctattgtataagagaagaaaagcaaaataggatgaaagaactatctaggcacacacacaaaagtcacactctccagaagaaagaatttgctctacttggtagtagacagaaattaactcactgaagatcaccagagaatcagatccaattatatcagcaggactttagtttacatcatggtactagaaccttctttaacattcaaaacttatgaatacctagaaatagttttaaggttaatatctctatgctgtgggctaaagagtacccacaaatgaatacagttgtgtctgatgagtgtctgtgattattttggaaattgtcctgctatttaaaatgaaaaaaatagaaatgtcttagattttcctatcattaacctattgtaaacaattacatcagtgtagggttgttttgtggttgcgtgggagtattttgaggtttttagggggtaaagtgggggatagaatgaagttgttgtttgcatttacaaccctaataattaaaacaagccagagggaattacctacatggctgttgtgatttctagtgtatgatcaaaaataattatggcactttgccatatgttcttgctttcttcttagatatgtgttattgggaaaagatgagacttgacatcaactaattgcttttttctaatatacaaccttgaaccacagtgattctctggaggacaaaaaatagcttagtgacaaagagattccagaaataagagcttttcgagcttttaactctctatgtaatatagacaaattgcacagattaatataaccaaatatgtattggtccatgggaagagagttacctatttgaagaataggagtgtattgtgttcatttagaaccattcagaaacatcaatgatattagttctgagttgactaaggataaatttttaaaagcaatacctaattggaaaattattcagttgttgaccattcctatcagtgctctgaaactaaatatctcacagatgccttaatgagttattataattatgttgctgtgatacatgtagcccaagtcagaagtcacttgctttgtatttaatggatggggaagacactggagcttggagggaagagaataaaaataacctagtttcaggaagatctatgctctaaccctgcttctgccacataacaacaactctatgatttgtataagttactttacctctcaaactcgtggtttcctcgataggggataaagaaggcctatttcatagagttggtgtaaaggatttataagggctgtaagtattagttcctgccctgtttcatccccctaccctacccccacccctcatcatggctctgcaaaaacaaatatgtctcagagttggaaagacccatctggtctttctcagataagggtagttttcttcaaacagactgattcctgcacataaaatataatataaaaaaccaaaagtaccttcaacattgtagacttttcatatgtggttgtctctgtgacttaaatgtacaatctagggtttgcatgttaaggtctttcaagattactgttggcactgatctgaaagatgtctcatgcaggaaatgctcacccaattatgagcactgaggctgtatagcaatatcagaaataatattgcagcacagtattttctatggattttagatgcagtattaaaaaaagaaaactcagcctgtctttaagactcgttttctctttcaacaccagaattaaaaggcatgccattcttttttaaagtttatgtgcagagccaaatgaatatcaacattagttctccactgggtccacggcttctttttaaaaatatctgaagcagtgttactctacccactttttctcaggaaattgtgtcctttagaactggcacccatatagtttaggaatgcttgatagggtatattttaggtgggagtcacctgtgcctatatggagctttgatgtcaatgcccttgtcatttggtgtcaatggttttgtcattctaatttatttggccccaaggtgtgtgtgtgtgtgtgtgtgtgtgtgtgtgtgtgtgtgtgtgtgtttgaaacacagcatatgtatttttttcttactccttgagaaatagaactttaaataacatttctatctttaaaatgtacttgtgaatagttatcactttcctgaattctaccttccaaaggtaggacaagagaaggatggaattaaatcacacatgcagctatttttataacttatgagcactcaatgatggtagcatccctcttctttaccttctctctgattctgaagccactgctgttttggttcctgtatggctgggactgcctgtccactagacttcctgccttcactctgaccctgctacatttaccctgaacaccatcctcccaataatcattaccagatgctattttcacaatgttacacctttacacaagaagctacagtggaatattatccttacagaatcagataaaaatctccaggcggcattctaagctctcattggctacactgtaccctttgaacctgaacttcctgagaactacctcttagctcctgcctgtagctctggctcccatcttcatgcagtaggtattcgttttcttttgaacggcctcatatcttctctgctagcaggattggagtcatggcagaaagtgagagggggactagaaggatgcaacattaatgaaacctcacaataggttaggcattgggttaggtacttggttgatctactcacatcatctcatctaatctttgccaaaaccttaaaaggtaggtattatcggccctacttatagacatacaataggtacttaatgcacatttttgtgatgaataaatattcgggaatttttgcattgtgactggatgagaagaaactaggaaaaacaagacgtagatgagaaagatacctctcatcttacttccaacctaggagatcttaaatgaactcatcagttttaaaaggtaatcttaagaatggagtcagagggtcacacaaggagagaaagcatcacgtattaccagagttcgggattgcttaaggcggtttgacagtttcctccgggggtaatccaccctaggccaggcatttttaaagattagattttgaaatgaagctttgcacttgggaatatactgaggcaagaaagcatatcccttctccctgctgagagagcatatcccttctctctgctgttgcagtgcttaagtgtgagaattttcgaatgagatatgaaagcaaagacaacaaaccctgcaggataatagtctctgaggactttaataacagccgtttttaaagcaaagcctgtggactcctaaatccatagctgctcgtttaagatgcaacgcaatgcagtggacctgaaaacatactccttatctacctagagcaaccaggctccaagccaaacagcagtcctcaaattaactcttgtttctcttgggacgacaactctgctgcttttaaaggtgttgcgtggccacatatagaataagaagggaaaaaacagtcacaccctcttgtgagtctgtatccaactgcattttctgatctggttaggaacctccggtggttagattagaatcctgataaggccaagactgtgggtccaatttcttcctatggattcttctcgaaaaacttgttaggaaagatccacttcgggtttttttttttttttttttgcgcttgttttaattcccaatccataatagactgatacttttgtaacatgcaataaaaatgaattattttaaaaattacaaataccagacatacaaaatttaagccgatgctttttatttttagattgctgtacacgtttctaaagatttgctttcaatttctgttcttatgtcttcataatagaatatctgtttctgtgtgtgtatacgtatgagtgtatgcaagtgtgctccaaaagctctactatttagagctcatgtttaatgagtcatgttggataaccagtctaagggagttctactttcatataattgtttttgttttatttttatttaaatcattaacaccttttcaaaacaactgtatcaaataacagtcatttggtcatttgaagcatttacatacactgctttcttcttaaacagattttactgaatgtaaatctgctttccctggctaattcagcatcatcatcctgagcattaactattttgcttcgctataaaacgaggtgatgccttcaagggctactgatgcatggagagctgttagtttccacactgtgtgaccctggtcaattatgcatgcccatggctccttttacacctttctgattctctgtaaggtgtcacttcttcctactctcaatttagccacttaggataatttctttactattttgaattgtatgttcctgaccttctaagttcttagaaatcagaccactttttttcccatcaagctaatttaaattagataaaaattatcagtaaggaggaactaatggccttataattattcatatactaactgctttcagaaaagcttagagataatctgtctataataaaattcttaaggagatttggtcacttattgttattctttctacaccattgtgtttgtttccttacttctcagctatattaaaatggggaagttttcatttgctgagtcctattttagagaccaataattccatttacataggaaaggaaatatgtggatacgattattcatgatgttctagaatagtatcacaaccatctgcttaatggttaataaaatggttaataataaaaagaagggtacagcactaattcttgacatctcccttctttatttttcttctagtaaaacatccataacttttcctattcttccccagttgtattattacttatgaacaccatggatcattctactttttgaatgaaatagtacaaatttaatattcgataatcttgtctttgtacttttctttctaaacttttattctcggtggcttcctaaaggaagactttattctacttggtttaagcagttggtctgcattctacctatttctctcaactctcattgtccattccaatcaggttgtgcaattcattgtccctgctcataaaccaaattcatttcacctttactccattcccatgctattctttttacctggaatattttcttttgttccaatttcccaatcgtatacatccctcaaggctcaagccaagtcctgtaacttcatgaaatctatttctaacatctgatttccacatggattatcttgtaatagtaagccctgcatttgctattatttattaaagatctcttgtgttctagacgctattcaaagtattttacaaaaattccatgtaatattcaaaaaattcagcaggtatgtattattatttcatgtttagtgaaaccaaagtaatgaaagagttttcatcattatgtggctaataagggaaagagaagagaagggtcaaacctatgtctatttaactgcactttgccatgagttttctctggaagctgagaaaggagattcacaacaagagtagatgagactcagataagaaggaagtgtggaatttgaaaaagcccttcagaaaacaggatctcccctactcctaaaactgctatactgtgaacatattgcttgtctcataactgaacttttttggtactctcagctgaaatttgctctataattgtacagaactttaggccaaatgtttcttttatggggacacacattatttgtttcgtttgcacccattttctcaattactttgtgttttctcttgttgtattggatgcatctctatccactgctacaaatctgtttaatagtctttatattaataagaccatgaaattgctctttgtgtgctgacatagttatcctttattttctaatggcagtgctagatttgctaaaatttaggtagtagcattattaataggaaaaactaccaccaacaactaaacttgaaaggtaatatagcctagtggctaagagcacaatccctgaagtctgactgacgaggttctaaatcttgctgcatttattagctgtgtgaacctgggcatttttagttaaccttacagtagtttcattatcttatatggaaaatgaagataatagtagcccctaccctagagggttgttgagaggagaaaatgagctcatgtatatacagtgctttggacagcacctgatgtacagtaaggttcatgtatgttgttgttcttgctgctgctgctgctgctatggtttttgttatgtaacaactaccttttcccctttgttcattcgttattgcttttcctaaagactacaatcacaaaaaagaagaaaaaaattagagagcatacagtgaatgcagtaatgaaggcttgaatgatcttttctagttaagtcagaagtgaaataaaactatccaaaaatttctatgaaaattatcctttgtccagattggctacccactgagaactccacttgattctccatatcaatcttttgctcttttgtgctacctgagtctgaggtgtagtctttaaatgatgagtttattggcacaagacagggatgccctctctcaccactcctattcaacatagtgttggaagttctggccagggcaatcaggcaggagaaggaaataaagggtattcaattaggaaaagaggaagtcaaattgtccctgtttgcagacgacatgattgtatatctagaaaaccccatcgtctcagcccaaaatctccttaagctgataagcaacttcagcaaagtctcaggatacaaaatcaatgtacaaaaatcacaagcattcttatacaccaacaacagacaaacagagagccaaatcatgagtgaactcccattcacaattgcttcaaagagaataaaatacctaggaatgcaacttacaagggatgtgaaggacctcttcaaggagaactacaaaccactgctcaaggaaataaaagaggacacaaacaaatggaagaacattccatgctcatgggtaggaagaatcaatattgtgaaaatggccatactgcccaaggtgatttacagattcaatgccatccccatcaagctaccaatgcctttcttcacagaattggaaaaaactactttaaagttcatatggaaccaaaaaagagcccacatcgccaagtcaatcctgagccaaaagaacaaagctggaggcatcacactagctgacttcaaactatactacaaggctacagtaaccaaaacaacatggtactggtaccaaaacagagatatagatcagtggaacagaacagagccctcagaaataatgccgcatatctacaactatctgatctttaacaaacctgagaaaaacaagcaatggggaaaggattccctatttaataaatggtgctgggaaaactggctagccatatgtagaaagctgaaactggatcccttccttacaccttatacaaaaatcaattcaagatggattaaagacttaaacgttagacctaaaaccataaaaaccctagaagaaaacctaggcattaccattcaggacataggcatgggcaaggacttcatgtctaaaacaccaaaagcaatggcaacaaaagccagaattgacaaatgggatctaattaaactaaagagcttctgcacagcaaaagaaactaccatcagagtgaacaggcaacctacaacatgggagaaaattttcgcaacctactcatctgacaaagggctaatatccagaatctacaatgaactcaaacaaatgtacaagaaaaaaacaaacaaccccatcaaaaagtgggtgaaggacatgaacagacacttctcaaaagaagacatttatgcagccaaaagacacatgaaaaaatgctcaccatcactggccatcagagaaatgcaaatcaaaaccacaatgagataccatctcacaccagttagaatggcaatcatttaaaagtcaggaaacaacaggtgctggagaggatgtggagaaataggaacacttctacactgttggtgggactgtaaactagttcaaccattgtggaagtcagtgtggcgattcctcagggatctagaactagaaataccatttgacccagccatcccattactgggtatatacccaaaggactataaatcatgctgctataaagacacatgcacacgtatgtttattgcggcactattcacaatagcaaagacttggaaccaacccaaatgtccaacagtgatagactggattaagaaaatgtggcacatatacaccatggaatactatgcagccataaaaaaaggatgagttcacatcctttgtagggacatggatgaaattggaaatcattattctcagtaaactatcacaagaacagaacaccaaacaccgcatattctcactcataggtgggaattgaacaatgagaacacatggacacaggaaggggaacatcacactctggggactgttgtggggtggggggaggggggagggatagcattgggagatatacctaatgctagatgatgagttagtgggtgcagcgcaccagcatggcacatgtatacatatgtaactaacctgcacgttgtgcacatgtaccctaaaatttaaagtataataataataataaataaataaataaataaataaaaaatgatgagtttagacaaatatcattatggtagtattatattatgttatgttatattatattatattatattatgtataatgtatattccttgcagcctgccctgcattcccaatctatgactcatgctgccttattgatactgaaaaatctccactacagcatgccagcttttgaaagagagccttgggttctttcccaatacttaccttccttttagggcaacctatctgagtcctgtagcttgaaagatttcctaccagcctgccatcccaaaggaacatggatgaactatgtttatgctgatgtgtcaagtcatttcttggtatggttcatagtagtccacatggctcttgtagacaaagagatgaattactgatggcagaatttctgttctggcaacagggaaatttgcagaaaggagaccttttcagtgtgaacattttttgctcacaggtggtccaggatgcccaatgctaaatgagaagtgaaaagagcaatcagggccaggtgtggtggctcacgcctgtaatccaagcactttgggaggccaaggtgggcggatcacgaggtcaggagatcgagaccatcctggctaacatggtgaaaccctgtttctactaaaaatacaaaaaaaattagccaggcgtggtggcgggcgcctatagtcccagctacttgggaggctgaggcaggagaatggcgtgaacctgggaggcggagcttgcagtgagccaagatcgcgccactgtgctccagcctgggtgacagagcgagactctgtctcaaaaaaaaaaaaaaaaaaagagcagtcagaattcaatttttcattcagaacaaatcaatccacgtgggtaaacattttatcaaactcaagaatgctgtctttcagggtgcttttccctcaacagtcacttatttcctcttgcaagtagtatcttcgttcaggttcagtgactactgtgtattatatccaatgcttctggcaagtgggttggtggaggcagcccaagatcttctagaatcaagagaattggatccatttcccagttctaacacttatcagctatatggcttttaggcaagtcagttaaacatccgagtctcagtgctctcatctgcaaaacagaaaatgtgatgtacttcacagagccagggggaggaataactaaggtggtacatttgtacgtgctttgtaacctgtaaagccctttactgtacacgtgtcatttacagctctgtatcaccatcatgacctagaaaagcagtactgacagaagacttatcttcttgccaatgctaagataactttagccatttctgcatttctaaaggaaggagtctttatcccagtatctatgaagacttggcaggaattgccgtcaatatttagttggtaatataaacgaattaaacaaaaatgcacactaggttttaggaaaattaaagacagaactatcatttgtactcctcttacatttcccaaagtgctaaaactagacaataaatcagtcctcaataaatgcttgtttatcaattttatattcatttatttgttgataatacaacaaagatgtttatatgcagtataatatatatggcaaagatgaaaagtagcaaattcatgaatcaacatcctatttatgcttgagaagacaaagaaagtgttggtgacttcatggtatacataaccttaaggagctcgtgattgagcctgggtctctgctatcaatgtaggatataaatttcaaatgtactatcctttatatgtatgttaatgtagtaaacatagaaaactgatgctactagtgagaatacttttacttgaacaactaaaagtttgtctttaatcccctaagtgcatacacaaaaggaaagtactgtacaaatcaagtacaacagaagaagtaaagtaaaagacaagtgaaggaattatctggaacttagatctggttggctttttctcctgaagtacttagataaattaactcacttttctcttttgctgaagaagtgcaaattaggcaggcatgttattccacgtaggcaaaaggaaaaaagaaagaaaaacataaaatggctatatatttgaccaaacttcgttctgcaagaatcccaatactaaccttctaccatataaactactttcaaaatcaggctatatccttccagtacaaacctggtttgtactactcagagatactactcagaaatactttcagtatttcccttctttcaacttctgatgtgattctatccatattcccctgcctgtctcccagtcaaagagaatgggacacaactctctttagagtccatcagtgatgctttagctgccaaaaatagtgacaatagacattcattgtctgtctaccttacttgttcaacattcagaattctgcatcttaagaggctgtggctgaaaacttgagccagttcttcagaatttctaacatgttatttctgccactttttctcccttactttagcagagtaatttaattcaatttgagagagagagagaaaaaaaaaacttttctagttacacagatcaatccaattgtttggagcttcagaatgaatttttaaacttgttgaacagaagcatacaaatctctaagagcaagtcagataatatacaaagcctccattcattgtgtaggcagaaaggaatgctggtacccggcagctctctgaggaatgttcccttggctttgactattctgctgggaacaaggaaggaaacacatatataaaatgaatttataatgtctctggcttgtaatggcagaatgataagaaaagttggctgtttaatataaactgtcagttgcatattccaggcctcctctctttgaggttcctcccacatccacacgcctggctactgtttagtgcggagtacaaagtggccgtttattattattgactggtgaggcctgtgctccaaaattcattctgtcaacagaatgtaagcaaagttggcattttaaagcagggctctttcagtttctgggttttctcaggattgctatgcaacaggatcagtgctgtagtgcccggttcaagctgaaaatgttacacaggaagacataccatgtaaaggtcagattcttctactataataattttcttgatctgtgtgtatacaagtgaagttgaatgcataacctcttatcataactcttaccaaggtcctatgtactttccacctgtcaagcctaaaaatgtgtattaaatgggaaatcaaaactaataaatgtatgatgctgtactatatgtatgatgctataataccaaggtgaacttaatttgtgttgtcaagaagattttctctcccatgacagactcccaggaatgtgctggtgctgtgggccaagtgcaatcttgtttattagtctctccacgcttttatggtcagagttaactctacagattactacgtaaatagaaaatatgacttgatccatatagtaatgaaattattggcactggggtacactttatcatagaattttattgcctatcacttccataaaataatacattttgtccatagactagaagatataacttgtgaactttataaagttataaatacattactttccaactcataatggcaaggaataaatctattacaactaataagatgcccattttaaatctacataataacaggagaaggcaatacgccaagaaaagggatttgagatgtatcttcttgttagtttagcctgattgaaatgtcttttgaactaataattatttatattttgcaattctccaaattcacattcatcgcttgtttcttttgtttggtaattctgcacatattcttcttcctgctgtcctgtaggacctccaaggtgaaattgaagctcacacagatgtttatcacaacctggatgaaaacagccaaaaaatcctgagatccctggaaggttccgatgatgcagtcctgttacaaagacgtttggataacatgaacttcaagtggagtgaacttcggaaaaagtctctcaacattaggtaggaaaagatgtggagcaaaaaggccacaaatgaattaaaatggccaaattttcctcattgtcttagcacaagtaactggtatctcacatgtctacgtaaatcatccaatttcagaatgattcactgtattttgaataaatgaatcatttatttgcttggtatggagatgatacttgaggattcagattagattaaagtggtaatgttttataaacataggagacatgcatattaagacatcagagtgaatttaaatgaggagtgcagctattctagtttcataaatttctctcttggcatatcacagggttatacaaaaagtgataaaaaattaacggatatgtattatggaattatttttggcattagtctaaatgcataccagaggacagtctttaaaaccctttataacacattacaattatataatataaaacctgtaacacattataattaacagtttagaggagatagctcctacagttaaagagagactatagcaacttcctgtcttttgcttcctctcagattttgttaaaacacatcctctgtaaactaagcttttagttgtagtatactcacatactttatattttgcccccttctatgtgccagctttctttggagaagttagttaatggatgcatcatagcatctttgtaaaaagggcagagggaagttcttgttataccagttttgcaatagttccgtggaggaacaaaaggatagagatagtaagtaaaacgcccattgtaacttaaatgatctagcaagggcggggaatgaaagccaggcttcctgctttctaagcagttgcctttcttaattcatttctctttattaaaaatattttgtgctttcttctgtgtctagagaaaaagtgataatgaagggaggtagaagatgaccaaatggacttaataatagttatgggagtatacactaaatgacgggagtagttactacctctaggtagaaagattacagaagggagattttttttcttctttatagttcttctaacttgtccaaaattttaacatatatacttctataaggaggaaaatctgcatttttagtaattcagaagcactattgtaaatgtctgcatcaagtatgaaataatgatagcaactaatatttacatgatgtacctacataccacgcaatgccataagcactttccattcattgaccggtttaatgctctcagcaaccctaagaggtagattttattattgaattctttttacatttgaagaaagtgaggcacagagaggctaaataatttccttagggtcacttagcaagtggaagatacaagatgaaaacagggagtctgggtgggccaggcgtagtggctcacgcctgtaatcccagcactttgggaggccgaggcaggtggatcacgaggtcaagagatcgagaccatcctggccaacatggtgaaatcccgtctctaccaaaaatacaaaaattagctgggcatggtggcacgcgcctgtagtcccagctactcaggaggctgaggcaggagaatcgcttgaacccgggaggtggaggttgcagtgagccgagatcgcaccacttcactccagcctaggggacagagtgagactctgtctcaaaagaaaaaagaaaaaagtaaaagaaaaagaaatcagggagtctgacttcagagtctgaacttttaaccaccatatgataccgtagcatataaagaaagaaggaaacttctacaaagaaatgcatactaattgaaaggatgaaatagagagtagattttttctaggagtagaaaaggatttgtttttatgagaagtagattgctaggagtagaacaggtttatttttatgtataaggttttgttttgttttgtttttcacaagtttgcaccctggcttcccagacattgttccttatctccctattttgtatatgaattttgtgtcaacttggtggtggtacactgggagcaacaatggcaatagcattttcaaagatagggaggctctattagctttctacagcttaaactcttaagagaggtcagtatgtgtgatgacgtaggccactttgataaccttcgtcattaaaaaagaatgaaaatgtgagatggaaaaaatattggcaggtcaagttaagttattcttttctgcacaaaagaaaaagaaagatgctataattgttccgagtatcacttagtgccttttctctgcctcatgtgaacttgataaaataaaaggagaattgaaagtggcaaatagcatgtcagccaaaatatggactcttcattctcagcagtttcccatgtcagctaccgcagtttgattcttgctgtcattaatcaggtagaaaacagttagcttatctaaggtgctgccaattctagaatttaaatattcagatcaatggttttggcttttatataggcctatgtaataatacaggatatgttataagcactcataaaaagcaaagaagtaattctccacatcaaagcaatttagcttatttcctgacacttgattgaaattagggtattgatcaatctacagcaaatggcagggttcaattgagagaagtacagtataggcagtaattagggatgattatgaaatagaatagaataacactggaagagttagatatagaaccattagtggcactgataaacctgcattatgaatcttgtcacttcttccatgggggttattttaaaatgaaaagttgccacaattaaaaaatagtttcaatgatatactggaaaaataggcctgtgtttgcccaagttataacatattataaaaaattacagttggcccattgtttggtgagcgattctgaaactgctcttatatttcaaaaaaataaaaccattaatgtgtccatttttaaagaaacaaaattgaatttaaatccaaatgatttcgaagtttccctttgtattccattggctcataagagatatccttgtgcttccaaatacaagtccatattgtatcgttttccttccatttatttttcttctgccatacatcttttctcttcctgtgattaagattcttatttaagtcatcatgttatgccatattgatacatttgcaagaatactctaccttggacgctgtttatatcatattactcttttgttcaaagcttcaatcttgtaggtctccatatctccctcattcatttatttgttcattcaacaaatatttaatgaatgcctactatgtactaggcactcttctgggcacggaggatgcaaccatgaataaaacataccaaaaaaaatcactgctctaatgaagttatatttaatcattagaatctagtagaaccttctctctctgccaactgtgcctaataagtccttgctaactccttcccttctcttttctttttctgcctccagttcctttctcaccaagcatcattctgttactccccaacatagattctctgagccaagagaatcaataaattctattttctaaccccattcctactctccaacaatttcctcactctcccatatgagtatgtacccttgctggttctcacacttgcaacattctctttcctcttattctccaaattttgattcatattccataacaaatcttttcttttctggctgtttcctcactaggtcttcccaatactattctaatttacacttgataacatgtttcttcaagtgttcaagagttgctttatagggctatgcttactgcctccagctaacttatatgaatacaaaaatttcaaactcgaaatatgtgagtatggtagagtagaaagacatgggccagcagctgggcaacccagtttcccttctgttctattctgtcactaactgtcttagcatataatcttgatcaagtcacttaactgcttcagacttcaattttctccttcactgaaatgaagagtttgaccagaaatatggacagtctcttccagttctcttgcaatcgtacaattttattcttttagttctgcaatcacactttatgaacctggaaaattgtttaatttttctaccttggttttcttaattaaaatagaactgattgatttaaaaggcattatataaagtaattaagatgtctttgagagaaaagaaatttaattgaaattgtataatcctatctcataatttaattcaagaaaagtatatgctatcattccacatgcattattacatcacatgttggccaagaggtataaggaagaaaagtaagtagtcagtgataatttaagttccatcaaacaaaacgaaaacattaactgctttaagtgggagaaaaagagaaaattatttacttaaatgtacacacacatgcatacacacacagttactgatgacgttatccaatattaagatggtaattagtcaaagaaagtgtttttcattctaaaattccatatccacaatccttgcatttttaattttagaatattaataacttgagaagtggtcaagtcaattgttttacataagaaatatatatgaagatttcaatttagtctactactagattatttttccagatcattgtatatactattaactatgaaaatcacataatatgttatcaacataatttcagcagaatttacattatgtgagatttttatatttggcagaaaaatttgtaaatgttatataaaatgttcacatttatacaattgtgaacattaagaggcaaggacactgacattatatagtctgtagaagccataaatctattggggagtgcttgctattagaggttagaatagttagtgtctttgtataatggagaacaaaagaagggcaaaaagaggtggggtctacctttgagagaaaactgcaacttggacattgaatatctctgaccttctttctctctcttttagaatgttaattatgtttggatgttggagttcaagacctgtctagaaaaaaaaaatgttgacttctctttgggattctctctatttaaagagatagctcccattttaattctgtggttctttaattttttttgtttctgaagtacaaattcaaattattcatctgttgatgacaccctggagatttttctcagtgttctcttgtagtagtttcatggtttgaggtcttacatttaagtctttaatctactttgatttgatttttgtatatggtgagagataggggtctagattcattctgcatatggatatccagtttttccgcaccatttgttgaagagactgtcttttccccactgtatgttcttggcacctttgtcaaaaatgagttaactgtaggtgtgtggattcgtttttgggttctctagtcttttccatgggtctttgtgtctgtttttatggcagtattgtggttctttattatttctgcattcctcccttttctttctgcatgtttaagtgctattttattacatgagggtactaaagatttatagggatatatcattagttttataaaggaagtcaaagtgaaaaatgaattcaatataacacatttcactttaagaatgcatgcctttcagagtaaagttttattaaggatttcaaactaggcattaaccaaatcacagttgaaatatctgtgtctagagaaataacaatcactttatcagcccctataattcttagtgtcctgacactgaggagttccttaaagaccaagcaatatactccagcacatctaaaggctctgcgttttacctaaaccttacaaattgtggaaattatcagctttttagagattagcacttgccttgttaaacggtagtaacccctaagctcttgtcttcactaataaagattaatagacatagatagaagctaagcatgcccctttgaaccacctcttttattttccgttgagtgggtaggagtaagcagaatatatttgacaattagcaatgttaaaagacaaactttagacaaattccgttttgcagagtttatttgagcaaaaaacaattcatgaatcagacagtactcagaattagaagttcagaaagctccacccagcaaggtgggcaggcagtatttatagatagaaaaaggaagtgacatacagaaacagcttgactggttacagcttagaatttgccttacttgggcatagtgtaaataggcatttgccttatatggacatgagctgatcagtttacagcctgtgattagctgaaacttgactgctgggattggctgaggctcagctatttgttacaagaatgtactcttaagttgcatattgcttacatgccaagctgggttgcagtttgctatgtacagagtcagctttaggcccaatttaatttaatttaacagcaacaagcctttttgttcagagatcaaaaacatttggttaaaaccactaaggtttaaggattttctcatctaacaaaggtttgtaatttctatttcccatatctaaataggacagctcaagttatgtttttcagcagctgttttatacctttgcaatcttgatttctacatatgcaaaacaagaaggttgaactataatctctcaggttccttccaaccccaacagcctatgtatgatataaccagaaaaaaaagtcattacaaatacaaagaaacattttcaggaggagatattccacatgcaaacataggttaatcatttcaaaatatctggtatatacactcatgaaaataaaaatagggcaactgcttccgataaatgtattagaaatgtgacttgaaaacatttcacgggcttaacatggtcaaagaaaatgttttgagctcacaatgttccttacatttagatcttcaaaatcaagtcactgacaaatgccacctttgccctgtggagaccaagaagtaatgtttggggcatatcagaaatgctttaataaatgctttatcaaagaatggttctggagcttacctgtggaattgtgaaggttcttgttgaaagcagagattgttgatagaattatagaaagtctggaggtggcacctagcaatctcaattttaaacaagctactcaaatgtttcttatacacactatagtttgagacccagagctttaggttgaatacatttgtatatgctgttttaattcattctctggctgcctttcacctcttcagttcttactcagtgttctctgtcctttgtaagtttttcgcttcagtttttgtcctcctatcacatttttcctttcactcttgagctttaggagaggaaaaaaatgaagcaatttgatatgtagttaggatgatcaaacattctgaaattttatctaactccacagcttagaaaaaaattaaaggaagtccccttacccagatatgtgagagcttttcgtcttttgaggttccaggtccgtcttctgctgctgtattagctctcttgactgtcctctgtccctggcttctaacaacttccctatttcatgctattaagtttctcttagatcctttagaactgaattcccggctgggtgtggtagcttacgcctctactcccaacactttgggaggctgaggcaggtggatcacctgaggtcaagagttcaagaccagcctggccagcatggcgaaaccccatctctactaaaaataccaaaaattagctgggtgtggtggtgggcgcctgtaatcccagccacttgggaggctgatgcaggagaattgcttgaacccgggaggtggaggtgcagtgagccaagatcgtgccattgcactccagcctgggtgatagatcaagactctgtctcaccaaaaaaaaaaaaaaaaaagaactgaattccctaggtctcagttattttgctctctcttaggggacctaaaggggttcattgacccactaataatgagtcagcaccatttaacctagaactggaattttagcacttccttacataaacaaagccgcagcttgaggtcttaacataggcagcctgcccttcactatatcctcctctagacctctctgccacaaggatattttgtttcctctaccaggcagacagaggccaaacattagtcatcgttatattctctcttcccttcctctctccctactccccaatgtatcctagagacttaggggcagtcaataaatatttatttaatcagtgtcttttctaccatttgctgcttttccatgtctgagccctacctctctccacctacttttcaatatgtcctgcttgacagcctcttttcactctcaaagggaccaagctgtgaattccagacaccccaaggaattcgtttaaccattacacattacatgctattaaacagctaaaatcttgcatggggaattgtcgcttaggcttatcatggaaaagtggtaactgaaaggatggtacagaaacataaaagaactgacctctaattgtatgcaatctgcatgcactattatattcaattcatgacatttatggtatttcacgattcagttcttgggaaataatacccttagagtctggaacaatttaatttatcttatttgatggaaatgccttcatttttcctggacatattgtttatactgcaattatagaaagaaaatcttgacaatttggaaaagtagaaagattaagaaataaatcacctgtaaatctacctctgagggataacctggttgtcattacaaaattttttcctagtcaagcatgtgcatacaaatacatacacatacacaaatgttttagaaaaattcaaaaaatgtatttgttttgtaacctgttttctcatttagtaactgggatgatgaccttttccatatccataaatatttggctatgtcatcatattgaaccttgcaaaggattttactgtatgaatgcaccattatatatgtaataattcccttttaaattaagagctatttaattaaattcatatataaatttcattaatttctaaatttaaagcatatacaagtttcattacatttgaaaacaatcagtaggttggggttttgcatttctcaagcaattccctcatattgaatatttaagttgtttctgttttgttttatcaatcataaatgatgctatatataacatttttccacctatatctttgtatctttttccaatttctttgttagtataatttccttgaatttaagcctgtgggtcattgtctttgcacattttaaagacttttatgtattgtcaaattatccttcagaaagtttggaacaatttaatttcagtagataagtattctttggtgattctgtttgactaaggccaaaaggagaattgtatttgtaatgtcaagctaagttaccaaatggctaagggaaatgttgctccacctggttgctttgctttacatttcaatctttgcagcgttaaagtctttattatatttatgttataggtagcgttattatgaattaattagtaattgctgataatagctgagtgattgagcataatttctaatttacctgaagataaagctttgctaacactgcgtttcctctttgttttctggatgatgatttattttattaatttagcttctcatcttcaagtgaaatgtggattttatagcacagatcattcatttgtgtattcttaaatggcttctaaggattaacgtgttctaaatacagttgacggtaaagcactcagtctcctgcctaaattattcatgttcgggggaagctttcagataaatgtctgattttactcttccatgtgagttgttgtcttagtactttttacacaaaggaaacaaagcagaaaatgttgaaacttggtgaagacaaatcccaggtgcacacaaataaagaagggtagggggaaaggagacgcatttgggaagaggagcagaaaggaacagacgccagatggaagaactcaatggaaaaggctgcctagggtgtagaaatggaaaagtcaaaatgtggggagagacctttccatttctcaaggcaaaaagaattccagtactagcatgagtcacatgaaaacgaagtgtttttcattagtcactgcatccaattttttctaccagaaatattaagaattgttgactacaacagtatggaaaagcaatagattccagtgtgtatttcatgccaaaagtctcagcattctgcatgtggaaataaacatatggctaaacactgccttttctcaaaattgccatcaaactatcctctgttttgtggctctcaaaagtaagtagccagatttttattcaagactgctttgtagttcacaataggtttattgtactttttcaatggaattgttagaatcatcaattacacttctagatattctgacatggtacgctgctgttctttttcaggtcccatttggaagccagttctgaccagtggaagcgtctgcacctttctctgcaggaacttctggtgtggctacagctgaaagatgatgaattaagccggcaggcacctattggaggcgactttccagcagttcagaagcagaacgatgtacatagggtaggacatttttaagcctcgtgccttgcacatgttaagcacatagtaatccagtgactattttaaaattaattttgtttgaaattaagttgaatagaaatcttttttactcttctcacccaagggtcaattataaataatctaagccattacactgtaaatgtcaaacacatttgtgttaataataccctttaagaaatcgtccatctcttttggctatataaaaaaaagcttttcatgatgaaaaatattgaacatatacaaaagtagacagaatgctataataaaactcgtactcatcaagacatcaacaattatcaaatcacgtcagatcttatttattctatagctcttcccagattgttttaaaacaaatatcaggcgtgtgttattttattgttaatatttcaaaaggttaaaagataggattcactcttttaaggtaatcaccttgctactataatgcttttgaaatatcaataatttcatcatatcaaatatccagtccatattcaaatttccatttttctcatacatattatgcattttttaaactttttctggttttggtttaaataaaaattgaaatcagacccacaccttactttggttagttggtctttttattactttttgtttggaagtaattacagattcacagtaagtttctaaaatagaatagtttccctgtatctttcaccctgtttcttttcatcattatatgtcatgcaactgtagtacaattcttattgtcatttcaacatgcaatcaatagaaaaaatgtacatttacagcacatctcaattcaggctcattacattccaagtactcagtagccagatgttgccagtagctaccgattgaacagtgcagttctatagtttgattgtatttgggtttggctttttttggcaagactgcttcacaggtgttcgtgtattcttccatcatcaggaggtggtatataatgccttgttttctctttttgtgtgatgtttaatagctgttcacgatcagtggctaggggttgcagtgtgataattgcctatctctaccattccttcttcatttattcactggggtaggtctatgaaaaaaatgttttgcacttgtctcctattttggtactcagtatacctttcataccgaacaagcaaaatacgtttcaattttaccaatttttataataacaacttgttcactagcatcctccaacgatgaccaattatttctttgtttgtttgttttatttttatttacatttctatcttctctactaagctctgagtgaaaaaggcagagattttgtcttgttcacctccaagaccctagagtctagtaaagtgtctggtgtagagtggatactgataagtgttttggaaatgagaataaaagatacaagaacagaaatgaatagcaaaccaaacaaattactaccaaataataaaaacttgataaaatggtaccacttttgtatgttgagcatgtaaaggaaagatctctgtggagatacagccaaaggtggcatcttgaggaaaggtcaagggtttatattattctggagaagaggatataggaaattataaaaagggaagagaacatgaaagaagacccagggatctttgcaaaaaaaaaaaaaaatgccagggaaactgccagtttctcctttagccatttgccttcatatatttctgaatattaaattagcttttgtggtagggtgaaatgtaatggtgctatgtgttttaaatgttctgactttgaataaacagccaaaacactctggtgtacatatagaaaagcactcattgagaaggatgggccttttttaaaaaatgcattatgcgatatagtgaaatgagacagaatttctacaaaagatgaattttatgctagttccagaaaccaaagaaaatgaatcactggacatgtgcactaggagtcaggagactgagattctagtcatatttcttcataagatggattctgattgctattttgttcttcaactgtaatatgaggaaattggtccaaataattgctgtggtttcttccagccagtattttgttataaatactgcttcactattcctggttattagttttggttgcttgttaagagtggtaaaatgtctgtacttaacgcagtccttactcaggaatctcatgacaaagaacatgacttggggagatggtgatgctagagttatgagtgatactcaccagaatgaagttaatccgtccccacttggttagtgtgcttgctcagatagctacctgttaacctttcgtgaatttcacaggacttccagcccattgattactctgtgttttatacattagttcctctgcccttccatatttacctccttccaaatacaacttagattcaatcatctaaattttaataacttgttttcaaaagtctgaaaccctttgcttctttatctttttgttgctgcaatctacaaaactccaaaactctagctaaatattccgagactctaactaaatattttctcataccagacaacaatgtagttgtctggtacagtaccttttccggatgaccagccttcagccttccactaccaagacatcactgggtcaatttttttttttttttttttttgagactgggtcttgctctgtcaccaggctggagttgcaatggcacaatcttggctcactgcaacctccgcctcctggttcaagcaattctcccgcctcagcctcccgagtagctgggactacaggcacgcgccaccatgcccacctaatgtttgtatttttagtagagacagggtttcaccgtgttggccagatggtctcgatctcttgacctcgtgatctgcctgtcttggcctcccaaagtgctgggattacaggcgtgagccaccgcacctggccaatttaccttcaaaattgtttttgactgtctactattgttatcatcataattatagaagaccatttctcctaacctttctgcatctactcttgccaccctacaatgcaatctctacatttcagtcagaataatctgtgtaaaaaacataaatccaattatatcagtccttatcttaacactatagtagtcttctcagtgctcttggaaaaagaccaaaatcctcaacaagggtgacaaggcactatctggcttgtctggcctcagcctcctctttcctagatgctcttcccttgctgtttggatgccagccatactgcctccatttactttttccaattctgcgtgtccctcttatgtggggctttaaatatgttggtcctctgtctcaaacccttttacctatacccacccactcataatatcctggttatcatctaataatcctttacatcttggctcggacattgtgcaaacttttccctgttgtctacatttgaccagatctttctttacacacttctaaaattgtctacttttctataacatagcgttgtttgtcatcacgtacatgtgttactatttgataaatatcgactactcttgctaaaccatgtccttcaagaagatttttgggagggggaaagctgtcatttttctactcagcacattccaaagtgcctagtatacagtagacactggttagataaaggaaggctattgagaccaagagcagggaaagaaagaatagagtggtattcccttcttatttacaggagttttctgtttatttctaattaagcatctttttgtaaagtgtgtagagctactttgatgcacaggtttttttttattattatactttacattctgggatacatgtgcagaaagtgcaggtttgttacataggtatacatgtgccatggtggtttgccacacccatcaacccgtcatctacattaggtatttctcctaatgctatccctcccctagccccccaccccctgacaggccccagtgtgtgatgttcccctccctgtgtccatatgttttcattgtttatctcccacttatgagtgagaccatgcagtgtttggttttcggttcctctgttagtttgctgagaatgatggtttccagcttcatccatgtccctgcaaaggacatgatctcatccttttttatggcttcacagtattccatggtgtacatgtgccacattttcttaatccagtatatcattgatgggcatttgggttggttccacgcctttgctattgtgaatggtgcttcaataaacatacgacatacagcttttacttgtagtttggcgcaatgctttttcaagcttctcttggtatctttaagaaaaattcttgacacaaaacactctccttcctcaaacaacatcatcgctcctgagtgctgatgagagaacagtttagtagcctgtttgactcaaagttttgtcacatgtatgtggtagccctttcatatatggactgtctagttagtgatgctcttgaagcctatgggcaaaagaacaatggaaaatccttgaaactggatctgcgtatcagatctcctgaactcagttagaaaaagagaaaaagaacagaatcagtacaaaattccatcaagatctaatagttgacagatcttatatttgtggacttttgttttactttgccatgtttccagaattgtacattgtattgctctttatgggtttcttgatttaattgttgtttgtatagaatccttggtatcaagatgggtcactgtaattgtaaacttattccgcaagtatttagagtgccacttttttaaaaagtcatctgcttactctctattctaaattattaatatcctttgctgatgctttttatggggatacaaatcccattaaaatgtcaatagttgaaactaaaatcaaatgttgttcattttcactttcattttctataaatcaggatgtttacaaaacaggtaatttgtgtttttctttgtataccatttcagattagtgataatattttgtagcaaaatattacatatcttgtactcttttcttgtagagaaaatatacagtcaatatcaattgctgtcatggagagatatatggttcttctgtaggtaaaattccaagatactccacagacatatttggggaccatagtctcactcctcaaagcaattttcacacccatgggagtagatctgtgctccccaaaccagctgggcagcataacaactgcaactgaatggctctcaagactaattaataaaataatgctccagatgcggtgaagtgttataaataattaaagctcaaatatgccttagcaaatataaactgaccaatttttatgtcttttgaatacattatcctggcttttacagttcctcattacttgcctcactagactgactcgttttcaattagtgggtgttattctggtccagatatattttaaaaactgacttcctttgttttacttgagcagtcactaaagtgatatttattacttgtctacttctgtgattaacctagagagagttttaaaggagcaaatcatagtggggaatttctaaggagaactgcaataaaacatcagcttattcaactcccttcctcctaccccaaatccaaatggagattagatcttgattgtaacaacagtgtaggtaatgactttttgtttgcctttttactaatgaaattgtttgtcactaggttttcatctttcaattaaaaaaatctctataatcccttccctagagatcattaaggataccttcaaagcttcccgagattttctggttaagatttagatggaagtaatcaatacatacattattaaaagagtggacagaaagccattattgcttggatgctgttgacaaatgaaaaggcttgaataaagtagtttacttgttcatttgtcaggtcatatattatgcatgttcgatttcttcagaagtcaccacaaagtgagagacaggctgagaaattcaataaaattatcctgaaatcatgttgtagattatacatttatttaggctcattctgttatcagtgctggcctgcttacgtgggatacattttagtatgtatgttagcttgacgagttttctgtgttttctttttacagaaagagaaaatatctttggatgtcatttgtgaatgttaagatttaagtcagctctgtgttaagaaaaatgcgttgttccctatcacctctgaaaaacaaccaaaagttgcgatagagtgattcattcttttttcttttctttttatttattttttctttaatttttttttgagatggagtctcgcctgcagcccaggctggagtgcagcggtgcgatctcggctcaccgcaagctccacctcctgggttcacgccattctccttctcctgcctcagctgggactacaggcacccaccaccacacctggctaatgttttgtatttttagtagagacggggtttcaccgtgttagccaggatggtctcgatctcctgacctcgtgatccacccgcctcagcctcccaaagtgctgggattacaggcgtgagccaccgcgcccggccagagtgattcattctaacattcaatgacctggcctcttagagtttctaaaccacttgactgttagttatatctactctaaggtgtctttttagccgcgttggaggaaatagacgtctttttgatctattcttcatcatttttgtataagtttgatatcctatgcagtcatatttagggatgctgaatagaaatgacttaaaaattatttttagaactgcatttctaggcatttgagtcttctgaaaactaagtctaagtcttctgaaaactagctttatcatcaaaactgaagaactgagtcatctaggaattgctgctttgctttaatgactgtaacaagatgagatgtgaataatttacaaactgacttctctaccagtcttctctctcactttgtcaaaatattttgatgtcctgacaaatactctttaaaacagtatctgcatagtgttttgccttgacaaagcacttttacacacattattcatttaattacaaatgatccccttgatttttttctgtgctcttccttttgtcccccaaaaacattattttaggaaaaattataccataactcagattcctagaatttattggttctttcaagaactttttttatgaagagcctactctatgttaagcatatgttagggaacaaaatgagtctctgcccctatggatgtttagattttagtgacagaaatacatagtaaacccataaattaatatatgaaattatgttgggtagtaagtgctatgaagagaaaataaacaaagcatgaatagagaaagattgaggagtactggcctatgtgaggaggttattttggggtaaagacttgtgtgaggccgggtgcagtggctcatgcctgtaatcccagcactttgggtggctgaaacaggcagatccctggacgtcaagagttcgaaaccagcctggccaacatagtgaaactacgtttctaccaaaaactagctgggcgtggtgacacgtgcctgtagtcccagctacccaggaggctgaggtaccagaatcgcttgaacttgggaggcggaggttgaagtgaaccaagattgtgccactgcactctagcctgggtggcagagtgagaccctgtctcaaaaaaacaaacaaacaaaacctgtgtgagtgagtaaaccatgcaaaaaccttgaatgaagaggattctaggcagaagaagcaccaaattcaaaagcccaatggtaagaacaggttttgagtgttgtagaaatagcaagatgagctgtgtatctcaagggaaataagatcagtagacagtgataggttctagaaagagggaaaggccagataatgaatggtcttgcaggccatagtttggaggtggattttattctgtgagtaaagagacatcactggaagtaaggaaacatcactggaaggctctcagcagggatgatgtgatctgatttatgtgtttagaagttgactcttgctgctatggagaattgactataaaaagagcgaaactgaagacacagaaaaggagggtggtggagtcatctcagaaggaaatgattacttggactagagtggaaatgataggtatggtgaataattatttgatcgaagatatatttggagggtagaattgatagaacttaagatagatagaatgtggagtttgagaggaagcaaagagtcaaggaaaattctgaggtcaatggcttgaacaaataaaataatgatgttgccatctgagaaagacttgggaatgatcacgtttgagtgtatgtgcttagaatgaaccagggttccatttttggattatgttgatagacagacacaaagggtatgattcagatattatttaccacttatacttgacaatctcaaattttggctcagtatcttgagaacatacacaaattaatttgtcacagggttttctaataatccattcatttctactaacatttcagaagtaatttccaaatcttaaagtttaggcttaatgacctaagacctaattccctaaatggccacgggaactagattgagttttcaccagtgatctctcaaggtcagctcagaacttaacaacattattgtcagtaggaagtaacttccccagtgattgttggaagcagcccagccttagaattaagagtcaaacagctgttcaagatgctgtgtgcgcagtaaactattcctccatagtatcacagacctgcaagcaggctggactattctagcccgtgcccttgatctcagagaatacaatctttgttttcaaagacttccagaaaaataaatctcaacacagagtttgttaaacacattttccccttatacactcaaaaatgttttttcattgactataattagatttttaaaaaaaaaacataatttcaggcctgaaatatgttcatttacttttcaattttacatcaaatttattcaatctcatttataaattaatattgttgttcatgttgttgactatctgaaacaatgaatggatgtatctgatacttcaatcccttatcttcacttttattcagaagtggagtgaaaataaggcggagctttttgtcatcttatttagatgattatttagtcaaactcatagaagcagagagtagaaaaatggttgccatacattgtaagggcgagttgttgctcaatggatataaagtttcagttatgcaagatgaaaaagttctagaggtctgctgcataacattgtgcctatagttaacaataccgatttgtgcacttaaaaatgtgttaaccgaggtccggagatcaagaccatcctggctaacacggtgaaaccccatctctactaaaaatacaaaaaaagaaaaaattagccgggcatggtagcaggcacctgtagtcccagctactcgggaggctgaggcaggagaatggcgtgaacctgggagacggagcttgcagtgagccgagatcgcgcaccactgcactccagcctgagtgacagagcgagactccgtctcaaaaaaaaaaaaaaatgtgttaacagggtaaagttcatattaagtgttcttatctcaataagaaaagatgattatggccttttctttatagcccagatacccatgttcataacttctgtaatactagctgtctcaaatgactattaagggaaacctctctttctgttgtttgctccattgcctctttcttcaaatttttttcttccatgaacccctatgaatttgctttagattactgggggcaatattcttgccaccctgccatgtacatcctggattgcttgcccttttccaagacctcgcttttaagttaactgagcattgcttgtcccgaagtgagcatttggtaaaatattcttatgtgtttgagactcaataaatatggtggctctttaaataaagaaggtccttttggtgacagaatatattcagcaactttcttgtcagacatagaaacaatacaggagacataaaaaataaggtagaaataacacaggaacaagaatgatgacgtaggatggcaaaactagtaaatacagatcaagttacagatatgactgttaacatcttgttctatgcctgctcggtatccatttgttgaatgaacagaactgttggatcatcctacatttcagagcctgtctagtgtcctctcatctcctacctaatcctgcagactacagaaaaagccccaagcagcagttcaaaccatggaacttctgagtgtttggacatgaaaatctcctttaagaaatcactaggttgaagaaggcaatgctaatgggaccacttcttgaggaaattccacccagtaactcagcagtgacactcagctttggatctggaacatgagtagacctagaataagatctgtccatttttcccaatttacagcattaattttttcacttatgattcatgagtccaggctttcccctgcaagcctgttttgcatctaaatcaacttggccttcatataacacactctagtgttctaactgggtgttctgtatcttagtcaacaatgtttactgagcatttactatatgccaagctatggctatggtttttaagcatcgataataacgatgcttagcagagactctcaaactgccaccatagagcaggcctgtggccgattaatgatcttaacaaattgattatagtatatgagaactggatgttagaacttagataaggttttagcaaatgcccacattttacaaatgaggacacagaggagcaggaagagtttatcaccttttctggatcactgcagccaggttctggcccagcccaggcttgaagcccaaggcttctgccactcagaacagtgctcttttcaccacttcagcctgcctcccaggatgattctaggaagttctgcttacaaatatgggtagtatttctagtcattccatcagattttattctgaaaaacacaaatttaccatttcaatatgaatacaggtaaaattcagcgccaggcaagctgtacatgattgaaagacatctgtgttttgaaaagcacgggcttttactcacatccatagtaatatgatcctaaatccactgtccccaggagaaagcaagatagcttttctccctgtcatgtcattacctatgcccagagttctcctcttgttcctctcatgaagcaaatcaatatctcacctttcatcccctccatacgtggttctgagctacttctatttatggcattatttagatatttttataatataagcaggaagcaagagggacagaaaaaaataatcagtggccaggtgtggtggctcacacttgtaatcccagcactttgcgaggccgaggcaaacggatcacctgaggtcaggagtttgagaccagcttgcccaacatagtgaaaccccgtctctactaaaaatacaaaaaattagcagggtgtggtggcgcgtgcctgtagtcccatctactcaggaggctgaggcaggagaatcacttgaacccaggaggcagaggttgcagtaagccgagatcgtgccactgcactccagactgggtgacagagcgagactccgtctcaaaaataaataaataaataaataaaaataataataatcaataacttggttcttctctattactttcaggaattttttaagtttctgatttcttccatggccattaggattttccacttatgtggcttccaaattattctaagtcagggagattttatgttttgttatcactcactttcagcttcactttagaattgcaagatttagattcaaagtgtgtaattaactgatggccttaggtaaaccctaacttatctgtatctcaatttgcatggatgaaacattcataatataaaagtatacaccacaaatatacctactcaaccaaactattggctccttaatgacaaagattaagtctctatatctttcctaactttgtacctaataggttcaaaataaatattttttgaatgaacaaattagtgagtcaacaatcagtcacccggttggccagtacctatggtgttttaagtgcaatctaccagataattcaaccttcataataaatagatttatcttgagattatcattgctataatagtgtagtagcatacttcatataagtttattttgtgaaccttaagaagctcaaggacaaacatctgtgtagtattcctaacattttctaaattgcatattttattttcatagaggtgctctacgtctttagtattgcttctaattctctcatatcactattttggacccttgggtctggctgtcttggaaaggtgaaaagaaaggtatggggaagaggatgtgttttaacaaagataattttatctgttcaagggattcaggaagtaattatcttaacatctgaatgctaacatctgaatattgtaaatacgtattctgtatgtacatgggagaaaatatctatatctgataccttttctatcatcacataaaggaactgacttctctggtttaaaatattaaccaaaatttatatgacaaaatcagtatatatgagtatatattttctcaaacctctttcaaacaggcctttttgggagacaagacacttatcaaaatcaaggctcttgacattaaatattcttgtttgtctttttttaaaaaaaagtcttcatttttctttcttttaaaatgcaataaattatactacaacatgcagtttatggtgagttattagatactgaaaaattggctttccattattttaatgcagattctacattgctttttttttactacataaagccatttgttttaagctccatgctacaaagaccacagatgttcattgcctagaacagtgtctgatacatagtagttgcttgaagtttgttaagtgactaaattaaagaggatcttacatataaccatgtttaaaattacatattgttatttatagtttttcccacatgataagaattattgccattttctttaacctctgacctccttgaaccaactatttctctctttttgtgggagttttatccttttgtatttaatctgaatcttttgaaattctaaagatacaatcacttaaccctctcttccatccactttcttttcttaatttcaggcaacaatgtgaaaataatggtgcttatgtctttgtaataacagaactttctttgtcttttctttggcctcattttaatcttcaatgactcatatttaagaaatgaactgtgcagctgtggtggatctaagtccttggcaacaactcgatgggcaaacacgtggtctctcacaatggatgctccttagctttgaattatttactgtccagttttaacaatggaattatatcatcaaatagtgccttggactttttaagtttttagtgccttaagtttttaagtttgatgagacctttaagatccatttccggccgggcgtggtggctcacgcctgtaatcccagcactttgggaggccaaggcgggcagatcacgaggttgggagatggagaccatcctggctaacacggtgaaaccccgtctctactaaaaatacaaaaaattagctgggcgtggtggcgggcgcctgtagtcccagctactcgggaggctgaggcaggagaatggcatgaacctgggaggtggagcttgcagtgagccgagattgcgccactgcactccagcctgggcgacagagcgagactccatctcaaaaaaaaaaaaaaaaaaaaaaaagatccatttccttattttacagaccttgttccaacaattatctccaccttctgtcaaggtcgtaacatatatctagggtgaccaactttcctcgttttcctgagactgtccaattttcctgaaactattctggttttaacatcgaaagtctctcatcctgaaaaactcaatgctggacaaaccaagatggttggttaccctactgctagcttccgtctttcactctaggttcaaatcattcctatgctaaaaagaacttcttatccctttgtcttgttatcctctctgtcctcctgtcgtgtcttcctcttttccttctcagaaaaagaaaattgaacatttgattttcacttgaaatacctactccttcttccactcactcctcagctatgcctacttctgaggcttctgccctccactgaaattgctctcagcacatctagtgaacactctgcaatgctgatcttactttacttctgtgtttcattggactcacttggtcaccctcttcctctcaaaattctcactctctccttgaaatttctacactcctcatttcccctaatctctccacctatttgttccttttctatctctcaagagatcctgttcctctgtttgcccattaaactttgatatgtaggcactcaacgtatattagctgaatgagaaaataactcctaagtattttttttctcctcaaacctcagaatttattatttccttgtggaaggaatgttagctttccaagctgagcatatcacagtcccttactctgtcccccatgcacagaacaccccccccacacacacacacacacaccatcatgttgcatttttaatattactcttcaataattttatcctgaatgagcatgaggggttctgaatcagaggcagatttcatttaattaccttacagtaaatattgttgctgtgcccttcctttgcccaaagacttacccctagggcaacatgatgaacgctgatgaaacattttcctacttgagtggctgggtactccataagtgggagactaggaaaaatcattttttctgcttataaaggagaaggaggctgctatccatctctcattctgaaaggttctctgtggaaacataacaggcctgagtcctaattccagcttctgcagaaaccagctagccctgtgtgtctcatgttttacaatctggaaatgtctccaaggtatgggcttcatattttttgaaatgtaaatacctagaaagatacccactccagtctttctaacaacatagagttcagcttaggaacctaccctgagctataaccgtttgaccctcttggatcagagaaatgaactagacaaattgctacagatctaatctccatggtgtgggaagtttctcaggaggctagagctttctgtaggtgaactgagacatccaggaaagtttatttcctcatacttagttgaattgcacccagcgtttgctcatctactcaacctagacactaagtgtcattcttgtttctttttctctcttctctccagcatctattcagtcaccaaattttcacacttcagatttttagacatttccctatcctatccctgtcatttttcctggtaccattgccctgagtcaaatcctcataatcttgcactgaattcttacaattgcctcattatctctctgattccatttctgttcttctcaaatacatactctgtatttatatcaggaagatctatttgaagcacacatattcctgtgccactcccttggttaaaaccgttcaaaggttcctgattaccttcaaggcaacacctaagcctcttagtggaccatatgtgatcatagagaggcagagcttcaaattctggtttaaaaatctaatgtatttccagatagcaatagtgtctttttcatctttggacatgccctctccttgttctttatgctctagaaacactggcctgcttgagattccgatacataccatactgcactatgtcctatgactctgcacttgcattttcctcttcttggaatgttctctagcatactcttccttgaataagtcatgttcatgcttttgaattctatgtgattactagcttctcctggaagcttttcccgattttcttccccatattgcgcaagtctatagcactgtctacattgtattgaaattatttacgtgtctgactcttctattatatgttaaatattcctaaatagaaagggctgttttgcattcaactttgtatttccagtttcaggtacaaccactgacacatggtagttcaatagagggagccattattatttttataattagtaatgtcagtattaattgcctcccttcaggtccaaacagagaaactaggcaaaatgataatttacttgaatttgggaaacttaattgtatgaaaaaaaacacaagaatacaacaactgaacacacacacacacacacacacacacacacacacacacacacaaacatggagatttcaagtgaaatatcaggagaatcagctttatatgtaagcagagtaaataactcacgtatctagcatgattttagggtacagaaatatcccattattcagaaagtacttccctatctgtaggctgaatcctaatattctacttacagaactccagtattttggttcaaacgccttccctttctctattgaattgtaaatagctgtggatgatgaatcattttgcaaagtatcagactcaggattcttttgaatggtgaacaccgctaagattttattaataaatgtgtcatacaatacagctctggaacacttctgtaacataatggcatatctgaaattcaaggaagaatactgctaatttgtttttccccagtgaaagaacagggcttaaattcagcaggcaacattgctaaaagacagagttgaaaaaagttacaaaaattaagccctagatcagggcaaatattactgttattgttaaacagttatattagcatttatgtagcatgcacttaatacttttattaataccctcacttctgagatcaaagaatctgggtcaataactctcttcaatggtgtcagagtatccgttaggttattctaggctcacggtatacctcacgatccttttagcactcgattatgtgtgaacttactgttttcactctgcttctagtgttaattttctcccttctttggatctagaaactttttgaaggcagaaactattcattttgtttttctcttgatcccctggataaaggaagattacagattaaagattaattctagatctgttcatttatagaaactagtgtccgcaattcctacatccataatagctcaaaacatttctactattctcaaagaggtcacaatggatgatgtaatgactatttttcaaaagtattgagacttttctcttagcttacctattttataccttgtcagacattttgacagaattaactggtgattgtcagttggattcattgtatactttaatatagcctaaggtcctgcaaatggcccttaaggcttcccattatgttctggatatccactatttggggtatgtttaagtcctcattagccatgctagagttttgcaatatataccttgaaactttagctgtagatttgaagtatggctgtcaggttacataaacaaagcactcttatctcaatgagagggcattaactatccagaatgctccccccatctccccagaatagctttacaaacacagcgctttcctcattaacagatagacccatatagcctttaaaaaaaatcattttataaccatcagtgtataaataaaagagatagaaattgacctgggagtttcataaacaagttctgagcacccaggattaattttgagaagaatgccacaagccaaataagcacttcttttcatctcatttcacaggccttcaagagggaattgaaaactaaagaacctgtaatcatgagtactcttgagactgtacgaatatttctgacagagcagcctttggaaggactagagaaactctaccaggagcccagaggtaattgaatgtggaactataataacatattgatagaaggatcagtggtgacggagcagcccatccattcttgctgccagggtctggatagctctcatattttcttggttaaatagaatcaattcaaattaaacatagatgctgaaaaaaaaataaggactcataaactaccatgcataaatcagtttgtgcattcataaataaacatcaaaagagattagcaatcagttattggaacatttagaaaataataaacaaagggagttatctgtgaggaggaattctattgttgcaaagactacaagttaattttccatttaagagcctgcctgaagtaaattagagcttgtggtatgcatcctaacgtttttctcctcaatagcttaagtgaatcttaaattgtcggattgatataaggtagaaactcaggaagatatactttagatgttctgggctgtatcaaaatttatgccaaagtataaaaaagccgttaatcagtaggttaccctcttgttcaactgtactctttctttcttccagtatgacctttttgacaatgtttaaaaaaaaagaatgtggcctaaaaccttgtcatattgccaatttagagctgcctcctgaggagagagcccagaatgtcactcggcttctacgaaagcaggctgaggaggtcaatactgagtgggaaaaattgaacctgcactccgctgactggcagagaaaaatagatgagacccttgaaagactccaggaacttcaagaggccacggatgagctggacctcaagctgcgccaagctgaggtgatcaagggatcctggcagcccgtgggcgatctcctcattgactctctccaagatcacctcgagaaagtcaaggtaccgtctacttctttgcttcagggccctttgagagactcaaaagagcttctaatctgaacttgagtgcagtgttatcttcccacaaagttaaagctagagaaatcagtccgtctttcacaaattcagtcttcattcacatggtattttctccaagagaagacagtgatctaattatttgtctgtcttcagttatatgaaatgaaatattaaaacagttacagggcaagaaatcactttgactttgatattaagtgattgtactaaagtctgatgtgtgtgtgtgtgtgtgtgtgtgtgtgtgtgtgtattggtgtattgcttgtgttacttagtatcagaatacagaaaaataaaacacttaatcaaaagccaggagtctaggtgttggcccttttgctaaccaaattacatgacttgggtaagttatggtttggtgaaataaggctgttaatgtgttgcccttcccttggaaggcaacatttgtaatacagtttcaagtttcattggcccactgcagaaatgagggaaaatcattatatatttggaagaccactgtctataagaccaaagttaaattcccttgtggcacaaagatggcaaatatattctgtagaaaaaaatacatatttaggagtatcattttgaaatcagcaactactcatctattgtcaaaatcacaaaaatcctcctagattaaaattcaaaagaagttaaattccctcatgcactcagcatgtttgccagcatctcagcatcctcattctagaagttgtcctcttccttggctttcatggaactgttccatccatgttcttcttcctatatttttctagattcttctcctagccacccctcaaatactgttgtgcccaagtttctaaccttagcctaattctcttttgattgtttaaaccctccctgtttgagatggcctggatggtgatgtatctacatctctagtccgcatctctcttctgatctctgaatccatgtggcattacgatcacaaatgcaactattctgaaaccaagttcatttgttctcctgttttccatttccctacttctgtcccctcttatctgaccttttttttcctgtttcctatttcagttaatgaatcatcatccaacaaattttccaggctagaaactttaggttcatccttaaacccttctgcattttcactgatggcacatgatggctcatgttacctcagaatagctcttttgtgttttctctcctcttttaaccaatgtcctttttaatccccagcatcttttacttagatgataacagtatacatctttaaatcccattcacccctctgtgtgcctggcatatctcagatactgcattttaaacatttggtgaattaatggatggatgaatggtttctttgctgatgttcctgcattacccagcttcttccaattccaatccaaactccttgcgggagaatacttgcctagagaatgaaatccaatgaataaggagattacgtggcccttttcttcctagccttgacttaccttctcagccatagctcctattctccagaccatttaatacactctgcccatatgatatatatatatatgtgatggcatatttgggaaaaaggggtgatatgggcagagtgtattgaatgtgtgtgtctgtaaagtatgtgtgtgtgtgtgtgtatatatatatatatatatatatacacacacacacatacatagttagatatatacatagtatatatacatatatacatagatatacacatatatatacacatagatatagatatagatatatctgcctttgcaaatgctgttctctctgtctggatccccctacgttgtctacttggcgaattctccttcagccctcaaggaccagccaaaatgttacctatctttgttgtctttcctgagtgtctacaacccccaactcccaccaagcagaagaaactgcttacagttggtactctcatagatcaccaagcatgctaaattgtcacacttaaatttcacatatattgtagcaacttgcttatgcatttttttttctcccagagaaagtgaagttgctaagagcaaggatcatgctgtacatctttgggctgctagcccagggccagcaacatatgaggaatctcattaggtaccttcatttattcactcaacaactgtttatgagtcattatataatgtgctggacaggtagttataaaagaaacagacttgatcattgccttcatgaagcctatggtctaatgttgaattgcatagctcttcattaaaatagtaggtaaaatttttaaaaagaaaagattaaaaatttgactctaatacttgtaaaatcccttctaccccaatgttttatgaccccatgtctaacatttaaagtaagggttaaccttgctgtgtactggaaaactaagggttttgaaatgtattacctagtattttaaaagcattaaatatgttgattttattcaaaaatatagggactaattttttgacagacttctccaaaaatgagaaataagttaggaaaatgtcccagtggaactaaattagttaatatgtcaattaaattgctcaatagataggctgtagagcagacataagggattcatttttagccatacttgtcacacaggtgcatttgtaagatactgagtatggatggagaagagaatgtgtacagcataatttaataattaaaaataactaaaagcataacagttcaagtatcagctggccttcacccaaccctatttgcggtattccttttagtttccctgtcttatctgttcttggtcttaagacaaacttcattttccataccctgattggtaaaactctcattctgatcccaatgatagcaaaacatataaacattaaacatacctttcgaaaaattatatttataacccagcacatctatctttctcagacatatatacacttaagttatggtacttatctgaatttttatgtactggtaatagtagatgtgattgggcttttgaatctgtgttgtattttatgcgtgtttcaaactatgaattacatgaattcatatatatttatctcccttcggtagctcttctttaattttgcagtggaaataaatcatttttctccactgcatcttattgacactgggtttgaaactctgaagctttgggggtagtagtttacaaagaatgagttttattaactaaaatttatttcagaaaaaaagtagaagtgtacttgaaaccactcttcccatttttccactcagcaatttaagccctcagaggattcatgctgtagggaacttttctaataaaccatggtttctctttttttattttattttattttattttattttattttattttattttttttttgcgacagtctcgctctgtcacccaggctggagtgcagtggtgctatctcggctcactgcaacctccacctcctgggctcaagcagttctccgcctcagcctcccaaatagctgggactacaggcgcccaccaccatgcccagctatttttttttttttgtattttttagtagagatggggtttcaccatgttggccaggctagtctcgaacttctgacctcaggtgatccactcaccttggcctcccaaagtggattacagcactgataactaggcagctagctagaagaacattttatatatccatatcagttcattttccttacccctagacactctatcatagtaccccccctccattctgatcttatgtgttaaataacttgttattcaagaaactaagtaatatgtgtttctgtgagatttagcattctgtaattgtattagcaaatgtggcttttggatttaaagaatgggtgaaacaacaatgactaagtccctggcctttatggaaatggcattattgctagctgatcatctgcgggtggtgaacatggtaaattaataaatggaaacacaatattaatattgactatattgctcactaagagaatctcagccttccaaacatagcttccataggaaaaaacagtagaatcaaatttaagttttaaatgcttctttacttttaaaattcatgatttatactgcttatcaaatattttaagggcaagatcatgacttttcactttactgaaaatagcaccagtgcttatttgactagacaaatattctaccttccttgtaatggggaataggaataactttttgaattactaggtgttccacatagatctgtaagtggaatatataaaggctttaataaagtagaataacttttaaacctgtagtctggatacaagatttttgttcttcaggacaatcccaaggtgaaaaggtttgtggattgttgttttctttttttttttttttttgagacagagtctcactctgtcaccaggctggagtgcagtggtgagatctcggctcgctgaacctcctgggttcaagcaattctcctgcctcagcctcctgagtagctgggactacaggcgcgcaccaccacgcccagctgatttttgtaattttagtagagacggggtttcaccatgttggccaggatggtcttgatctcttgatctcgtgatccgcccaccttggcctcccaaagtgctgggattacaggcgtgagccaccgctcccggccagattgctgttttttaatgttttgtttttgttttaataaaccatggtttctctttttttaatttttttttttttgagacagtctcactctgtcacccaggctggagtgcagtggtgctgtctcggctcactgcaacctccgcctcctgggttcaagcaattctctgcctcagcctcctgagtagctgggattacagacatgtgccaccacgcctggctaattttttttttttttttggattttttagtagagatggggtttcaccacgttggccaggctggtctcgaacttctgacctcaggtgatccgttcaccttggcctcccaaagtgctgggattacaggcgtgagccactgcgcccagactataaaccatagtttctctgtaccaaaagtggtatgtccttcttgagccaggaatatttcactgttcttagtttacctgttgactctgaacacagtttttcatacactgtaaataactctcccaggctgccatcttggaatatgcaaatctgtcgcatctatgtagttatgcatatcgcatttttgtcaaacttttaacttgcatttcttactgtgaaaagtcagggcagggattctatgagttttttctttaaagttcctacaatgaaatgttttgattaaaccttttttggcattcaaattgagattgatttaatgatgtgtgtagtaggctagaaattatgatgaagtgacgatgccatccttatttatcttcagcattcacatctaaagttttaagaagaaaactggcaaatccacctttttaggcttaccatcctcagtccctgtggctttgggtttttttgagaaatttgtcaaagaaacgctatgttagaatttgacattgaggaagccaagcatatttcctctgaatagataatgtgaaatgtgatataatgtattagaatttcatcttcactttggcaagcaagatacttgcaaccatgttcatgcaactatcttcccttattgcttttctcttcttaaccttggttctaaagttttcttcttattgtattaattttgttatgcttcccatttatatgagtcaagtcaaccttacttgatttcttatatatgagttatgtaaggaaaacttatcttttcttatagaattaggggatgaatgagcagatagaaccaacatgaacagggcgatcctaaaaatcattcaaaacatgtaagctctcccaactctgaataaacttgtgatatcttcataatgaataaggtatactgcctatagtaggaagaggaaaatttattaatgttttgtgcattgttaaagaactacaaatgaattgccgtgtggaggctttcattgttgttgttgtaaaaatgctatgtgtattaagtaagcctttgatggagaagaaaaaacaaagaaaaaatatttaatccttcataaatctgggttaaatatgaagctaattcctgttatttggagtaaccagggttttatctagtttacaaagcatgcaattgcaatgtttaaaagcatatgatttggcctttaatatctgaaaatatgtctatcaaaggccatattatagcgagtgtcactccatactttataagtacggtatatttttaatagaatgtttatgtactggtgataagagatgttactgggtttctaaaccagtactgtattaaggattttatgctattgtaagattatggattatgtgaattcatatatattgatttactttcagtagcttttcaatagaatatctagggtttaatacagcttagaaactaaagcaggaattattcatctttaaaatcctgaccaaagaagtggctggcaagatggctgaataggaacagctcaggtgcgcagcccctagtgagatcaacacagaaggtgggtgatttctgcatttccaactgcagtacccggctcatctcactgggactggttagacagtgggtgcagcccacagagggcgcagaagcacggtgggatgtcgcctcaccccggaagcacaaggggtcagggaattccctcccctagccaacagaagccgtgagggactgtgccctgaggaacggagcattccagcccagacactatgcttttcccacagcctccgcaacatgcagaccaggagattccctcgggtgcctacgccaccagggccctgggtttcaagcacaaaattgggcagctgtttgggcagacaccgagctagctgcaggcgtttttttcatatcccagcgtcacctggaacaccagcgagatagaaccattcactcccctggaaaggggactgaagtcagggagccaagtggtctagctcagtggatcccacccccaacggagcccagccagctaagatccactggcttgaaattctcgctgccagcacagcagtctgaagtggacctgggatactcaagcttagtgtggggaggggcacctgccattactgaagcttgagtaggcagttttcccctcacagtgtaaacaaagccgtcaagaagttctaactgggcggagctcaccgcagctcggcaaagccactgtagccagattgcctctctagattccttctctctgggcagggcatctctgaaagaaaggcagcagccccagtcaggggcttatagataaaactcccatctccctgggacagagcaccacggggaaggggcagctgtgggtgcagcatcagcagacttaaacgttcctgcctgctggctctgaagagagcagcagatctcccagcacagcactcgagctctgctaagggacagactgccttctcaagtggggtcctgacccccgtgcctcctgactgggagacacctcccagcaggggttgacagacaccctcatacaggagagctctggctggcatctggcaggtgcccctctgggatgaagcttccagaggaaggaacagacagcaatctttgctgttctgcagcttctgctggtgatactcaggcaaacagggtctggagtggacctccagcaaattccagcagacctgcagcagagggttcctgactgctagcatcaacatcaacaaaaaggacgtccacacaaaaaccccatctgaaggtcaccaacatcaaagaccaaaggtagataaatccacgaagatgaggaaaaaccagcacaaaaagcctgaaaattccaaaaaccggaacgcctcttctcctccaaatgatcacaactcctctccagcaagggaacaaaactggatggagaatgagtttgacgaattgacggaagtaggcttcagaaggtgggtaataacaaactcttacgagctaaaggagcgtgttctaacccaatgcaaggaagctaagaaccttaaaaaaaaggttagaggaattgctaactagaataaccagtttagagaggaacataaatgacctgaaggagctgagaaacacagcacgagaactttgtgaagcatacacaagtatcaatagccaaatcgaccaagcaaaagaaaggatatcagagactgaagatcaacttaatgaaataaagcatgaagagaagattactgaaaaaagaatgaaaaggaacaaacaaagccttcaagaaatatgggacgatgtgaaaagaccaaacctacatttgattggtgtacctgaaagtgatggggagaatggaaccaagttggaaaacactcttcaggttattatccaggagaacttccccaacctagcaagacaggccaacattcaaattcaggaaatatggagaacaccacaaagatactccttgagaagagcaacccaagacacataataatcggattcaccaaggttgaaatgaaggaaaaaatgttaagggcagccagagagaaaggtcaggctaccccaaaggaaagcccatcagactaacagcggatcatttggcagaaaccctacaagccagaagagagtgggggccaatattcaacattcttaaagaaaagaattttcaacccagaatttcatatccagccaaactaagcttcataagcaaagtagaaataaaatcctttacagacaagcaaatgctgagagattttgtcaccaccaggcctgccttacaagagcttctaatgaaggaagcactaaatatggaaaggaaaaactggtaccagccatggtaaaaacataacaaattgtaaagaccatcacactatgaagaaactgcatcaactaacgggcaaagtaaccagctagcatcataatgacaggatcaaattcacacataacaatattaaccttaaatgtaaacaggctaaatgccccaattaaaagacacagactggcaaattggataaagactcaagacccatcagtgtgctgtattcagaagacccacctcatgtgcagagacacacataggctcaaaataaagggatcgatgaatatttaccaagcagcaaatggaaagaaaaaaaaagcaggggttgcaatcctagtctcagacaaaacagactttaaaccaataaagatcaaaaaggacaaaaaaaatggtattacataatggtaaagtgatcaatgcaacaagaagagctaactatcctaaatatatatgcacccaatataggagcacccggattcataaagtaagttcttagagacctacaaagagacatagatgcccatacaataatagtgggagattttaacaccccactgtcaatattagacggatcaacgaaacagaaaattaacaaggatattcaggacttaaactcagctctggaccaagtggacttaatagacatctacagaactccccaccccaaatcaacagaatatacattattctcagcaccacatcacacttattataaaattgaccacataattggaagtaaaacactcctcagcaaatgcaaaaaaacagaaatcataagagtctctcagaccacagtacaatcaaattagaactcaggattaagaaactcactcaaaaccacacaactacatggaaactgagcaacctgctcctgaatgactgctggataaataaggaaattaaggcagaaatgaataagttctttcaaaccaatgagaataaatacacaacggaccagaatctctgggacacagctaaagcagtatttagagggaaatttacagcattaaaatccccacaggagaaagcaggaaatatctaaaattgacaccttaacatcacaattaaaagaagtagagaagcaagagcaaacaaattccaaagctagcagaagagaagaaataactacgatcagagcagaactgaaggagatagagacatgagaaatccttcaaaaaatcaatgaagccaggggctggttttttgaaaagattaacaaaatagatagactgctagccagactaataaagaagaaaagagagaagaatcagacagacacaagaaaaaatgataaaggggatattagctctcatcccacagaaatacaaactaccatcagagaatactataaacacctctacgcaaataaactagaaaatctagaagaaattgattaatttctggacacatacaccctcccaagactaaaccaggaagaaatcgaatccctgaatagaccaataacgagttctgaaattgaggcagtaattaatagcctaccaaccaaaaaaagcccaggaacagatggattcacagctgaattctaccagaggtacaaagaggagctggtaccattccttctgaaactattctaaacaataggaaaagagggactcctccctaactctttttatgaggccagcatcatcctgataccaaaacctggcagagacacaacagacaaagaaaatttcaggccaatatccctgatgaacatcaatgcgaaaatcctcaataaaatactggcaaaccgaatccagcagcacatgaaaaagcttatccagcatgatcaagttggcttcatccctgggatgccaggctggttcaacatacagaaatcaataaacataatccatcacttaaacagaaccaatgacaaaaaccacatgattatctcaatagaagcggaaaaggccttcaataaaattcaacaccccttcatgctaaaaactctcaataaattaggtactgatggaacgtatctcaaaataataagagctacttatgacaaacccacagccattatcatactgaatgggcaaaagctggaagcactccctttaaaaaccggcacaagacaaggatgccctctcccaccactcgtattcaacataatattggaagttttggccaggacaatcaggcaagggaaagaaataaagggtattcaaataggaagagaggaagtcagattgtctctgtttgcagctgacatgattgtatatttagaaaaccccatcgtctcaacccaaaatcttcttaagctgataagcaacttcagcaaagtctcaggatacaaaatcaatgtggaaaaatagtaagcattcctatacgccaataatagacaaagagagtgccaaatcatgagtgaattcccattcacaattgcttcaaagagaataaaatacctaggaatacaacttagaagggatgtgaaagacctcttcaaggagaactacaaaccactgctcaaggaaatgagagaggacaccacaaacaaatggaagaacattccatgctcatggataggaagaatcaatatcgtgaaaatggccatactgtccaaagtaatttatagattcaatgcagtctccatcaagctaccattgactttcttcacataattagaaaaactactttaaatttcatatggaaccaaaaaagagcccacatagccaagtcaatcctaagcaaaaagaacaaagctggaggcatcatgctacctgacttcaaactatactacaaggcttcagtaaccaaaacagtatggtattggtaccaaaacagatatatagaccaatggaacagaggcctcagaaataatgccacacatctacaaccatctgatctttgacaaacctgacaaaaacaagcaatggagaaaggattccctattcagtaaatggtgctgggtaaaccggctagccatctacagaaaactgaaactggaccccttccttacaccttatacaaaaattaactcaagacttaaacataaaacctaaaaccataaaaaccctagaagaaaacctaggcaataccattcaggatataggcatgggcaaagacttcacgactaaaacaccaaaagcaatggcaacaaaagccaaaattgacaaatggaatctaattaaactaaagagcttctgcacagcaaaagaaactatcatcagagtgaacaagcaacctacagaatgggagaaaatgtttgccatctattcatctgacaaagggctgatatccagaatctacaaggaacttaaacaaatttacaagaaaaaacctaatcaaaaattgggcaaaggatatgaacagacacttctcaaagtaagacatttatgcggccaacaaacatgaaaaaaagctcatcatcactggtgattagagaaatgcaaatcaaaacacaccagttacaatggcgatcattaaaaagtcaggaaacatcaggtgctggggaagatgtggagaaataggtgtgcttttacactgttggtgggagtgtaaattagttcaaccattgtggaagacagtgtggcaattcctcaaggatctagaaccagaagtaccatttgatccagcaatcccattactggttatatacccaaaggattataaatcattctactataaagacacatgcacatgtatgtttgttgcagcactgttcacaatagcaaagacttggaaccaacccaaatgctcatcaatgatagactggataaagaaaacgtggcacagatacaccatggaatactatgcagccataagaaaggatgagttcatgtccttggcagggacatggatgaagctggaagccatcaatctcagcaaactaacacaggaacagaaaaccaggcaccgcatgttctcactcgtaagtgggagttgaacaacgagagcccatggacacagggacgggaacatcacacaccggggcctgtcgaggggtgggaggttaggggagggatagcagtaagagaaatacctaatgtagatgacaggttgatgggtgcagcaaaccaccatggcatgtgtatacctatgtaacaaacctgcacgttctgcacatgtatcccagaacttaaagtataataataataaaaaaaaaatcctgaccaaattatttattcaatgtgaaattaattgtaagttagtgttgccaggagagcttattacttagttaccatgtattccctctcatctcctgctttgtttataaagctaaaagcaaattacttaggacagcaatgtcaaatcactttctttccccaaagcatctgattttagatagcgctgtgtgtgttttaaaagcccctacctcgacttaggcaaacagaaccttcgtttaccatgctattcccatcccgcctttgaaacttctgaaaaggcagagcggagtaattgtttcagacatctgcttagcatactttgaagtgcatataagttctttttcagtttcatttgaaccccagctgtcttcaccgaagtctataatcaatctgaattaagttgtcctacttctcctaataagtctcttattaagttctgcatcagcctcttagggagacttaaaagctaattcatgtagaattgccattttctactaattcacttgtcagctctccaaattccaacaaaaacaattgcaaagactattaatttggctcttcataaacaacttatgtaagtgtagtatacattggaaccaaacaaacgatttaaaacagtgggtgggaggaaatgagttgatggcattcaaaacgcttccttttttgactgttatgaaatgccttccacatcgaaagcataaagccatttatttaataagggaaacatccttctgcttttactttcatagatgagataatgactgaatgaactttgcttaaagacaggaaaaggctttagaacagttggaaaaggaacatgttctttttgtcattgaacttattttaatttggacttctttgtgttattttgatggactgtgataaaagaaggagctagaattggttattattgttattggattaaatcagagttgtacagctactcttctggtcatgggatatttaggagaacacgggtaatcaaaatgttcagctaatgagttcatctgattctactcaagaagtgtttaatcagataataaaaatttctccaaataataccatccttcctactatttgaaaacaaccatatcaacatctgatcctataatatgccaatcctgtttgctaggattttctgaaagctttgtttgtggtgggtaataactagaaatactattcctcaagagtctcgggtaataaaagattattcaaaaaacttaagtaatatactctcagtattagaggatatacaaatgcactcattcattaattcatgatatgattgaaacctatacccagagaagtctgatctcattatagagtgtgaacatttaatttatttcaaaaacaaaaattatattgagagttgtatagatggcatcttagttttcctgggaatattattatttagcaccaagctgagggagcaagaatttgtattagcttgtgtatacatgtgcatgtaccacattaactagaaacagtgctaaaatgtgagttatttatttaactgaaattccatatttcctaagaaaatggaatcacacagccaatatatatttttaattattttttgacatctaccaaagttgtgacaagaataaagttcacaattctgttactctcctaccgttcagtaaaacaggaaatgctttaagatcaaataacccaaggagttcgcttcttcctgtcatgcttgacaattacaattttcaaaatttaacagttagcattgacaccagtattatgccttacacaacctgaaattaactaagttaagtaatggcattgaataatttttcttggtaaatcagttttctgggtattatgggaacagttgtgtctgtgatactaatgtctctctcattttaatggggcctaagaaagaactttttcataataagattttttcatgttaaaataatatttttagttatagtttacacttactgcaggtttttctatttaaaagcatcttccgagagcagtgattcttaaacttatttacttcagttatcttaacagcatagaagacatagcctgacatctcccgcttccacttacctatctcctttttccatgagcatgaaatttctttgatgttcttgttttattttttaaatctcacatcaattttatggtattttccataatggattcatcatgttttaatatgaagatgctttttcttcaaattctgaagtaaggaatctttcagcacattcacctatggacatgaaagcgtaagttgagaatcacagtataaaggattgcccagtttttgcaggctttatctttttccatcaacttctgtcttttatgtacacagacaaaaagagcagacccttgctatttcaaatttatcttttgcaggttcatctgattattgtgatccaaagttccatgactagcagctcttaattttgaacatgtattatttcaagcttttgtgcatagtcacttaactaatgagttaaatggcattttaagtcaggttccatgaacgcagaccctgagaacaggggtctaggtgcctgtgatttatagagggtctgctctcaggagaagcctgtattggagttagggaaacaatacaggagaagaaagagcccagcaagtatgccatttcaggtgaaacctcacattgtgtctgatccagagagagagcaagccctcgagcagaaacctcgctgtggagttgtactctttattttattttatttttttgagatggagtttcgctcttgttgcccaggctggagtgcaatctcagctcactgcaacctccgcctcccaggttcaagtgattctcctgcctcagcctcctgagtagctgggattacaggcatgcaccgccacgcctggctaatttttgtgtttttagtagagatggggtttcaccatgttagtcaggctggtcttgaactcctgacctcaggtgatctgcccacctcagcctcccaaagtgctgggattacaggcgtaagccacaacaccgagccggagttgtgcctttataccagtcattgtctgtgtcactgaagtgctggcaaatatttgtcgactagctctgaggtgggatgaatcctggtgtgtatcaaaaccagttttcgtggtgtaaatactccctctaccactgatctccagctaccgacataatgccactgagtatggaattgggaggagatgcacacaattggctcttgggctctgctgcagcacaccactggctgtggtccactcctgggatatgggttacttcctgggctagggggctcccataagcagaggtcacatgtggagaaggcaggtagctataagacattaatagtcaaccatcacagcagctgaaggatggatgcccaggttaggtaaagtgtcccctgcaactaataagtaaacctagtaatccactcactcttcatattcaacttggctttttttaatgctgttttgtttttgcatgtacagtaattctttataaataatgagaattttgtttctttatggaaaatccacctaccctccaccctaccatgaatagcttgatagctgttcatcagaattagtgatggaagagaagagttaatgaatgaaaaagtctaagaaagtgatcactattagtaagaaaatggcctcataagtgagtttggctttatagttatggaatctgtaaatgtctaggcattcagacatgtccagacatcattgagaatgtcaagaattttcagtggcaatggttctcacctcagcatacatcagaatcacctggagggcttgtagaaactcaggttggtgaaccccttccccagagttcctgattcaaaatgtctggggcaaggctaagaagtcccaacttgttcccaggtgttcatgatgctgctggttcagagatacattctgagaaccaatattccatagtaaagctactgtgtatgtacctgaagacatattttgtgtagtgttagcgtttcttcaattacaagtaataaatatatcatttattatttcttttatatttatcaatatccagaagatttagtttaaaaatgaatgcaggcacacagcctcttgttggattgattaatagtttagatatgggagcatcatagggagcattgtttcgcttaggaaccttgaaatgaataaatggcttcttttctaaatctcacttgtggaagactttgacggtggtttatttcattttttcctgttggtattttaatgacactggtacaattttggggttgcttcagatgaccaacagcataacttgccttcccagtattaatttttaacgttaaaaatatttagtcatggccggccgtggtggctcacgcctgtaatcccagcactttgggaggccgaggtgggtgggttgcatgagctcaggagtttaagaccagcctggacaacatagtgaaacctcgtttggacaaaaaatacaaaaattaaccaggtgtggtggcatgtgtctgtagtcccagctacccgaaaggctggggcaggaggactgtttgagcacaggaggttgaggctgcagtgtgccctgttcactccactgtactccaggctgagtgacaaagcaagaccttgtctcaaactatatatatatttagtcacataacttttcactttgtgtaaatattttttgcatttaccaataaaaacaattacatttaaaaattctccttacacttttctaccaaacatactgatgataaaatagtactttatagagtttctgaatctaggatattaaaaatagttgggatcagtcaacactttttaagtaaaatctacttgctagatatgaatagctaacagcttctccaggagtgcctacattttataacttactttgtccaccccttgaggctctgtgttcagggggagggtatatttttgtgtatagaaatagagatgaggtgaaatagagatgaaatagagatgatgtgggatcaactgggagaaagtagaaaagagtcttagctgaagtggttgaggaaggaggatttttcccaaaatggtgcaaaaaacaatgtattaaatatctgtgaaaaagttcatggttgtggtatagggtgagtggtatatgaaaagagaattatgggataaactaatggaaacagatgtcttaaaatttgcttttaactttaaacaagagacatgaaacttaaacttttcccttatcctagaatctgggagaggagaaggatgagaaaaaatgaaattttacattagaagcaatttgattaatgttcaatggaaaatggaaatagctatggtcaaacccactcaaatcaagtgtacattaaataattgagttaactgaattaggcagagtaagggcacattgattttcagtgttgttgaaaattggtccacatatcattgttatgctttttgtttgtaaacctcaatatttattaagtttccacagtgtgctcagccctgaaacgccaaattctcttaaccagaatgaggctggaggatctaacactaagacagatttctattttcttttaaggaattgatttttatggtaattttttttcttcataaagttaagaacctgccagtcctgtttcgaaacacacttatttttagaagtttggttttccgggattatgcatcattatagactcaaatgactcatttagaacttttccctatcaaatattcacattctatcatcatgatcttaacacggcataagcaagttagtgaacagagtgaagtcaatttattggcaatatatgccgaagtacaggaattaagtagaaacaaaagtgaatgagagtctttggcaatacattgatgtgttttttttagaaccaatgataaactactgctgagtttcctttcatttacttttttcctactcttaaaacattgtaacccattttgagatctatccattgttgtgaacctaaagcctattaggtcttattaaataatacccatttaactgacctgtgatttaagtttcttatctgcccccaagcaagcagactgtatgcaacggcattttacctgcttcaccttctgcttgccagttggtttttggtcttcacatgtttctagcagggatggggctaaagcaagggagagaatggtccattgttttagactttcacaaacccaatatactagaatctccacaaaggttatccaatatcagggtgacttttgtgcatccaataaagcataaggttaaaagaaatacaggctaaacaaatgagcataaattactccgttggcttatgctgtgaataaaatattacctttggaaccatctcaattttttttttgtataaaggttgaaggaagacatttgcaaagtcgtttctcctataaaactgcctagggtttggggttgattgttgtatgcaagaggggtcttggtgaaatctgacccactttgaatctaaaattactgaattattagtgaaaagattattttaaaaagagttttgaactctttttcctactgaaattgtattctcctttagataatcaatgcagcatcacccccacagatttttgagggcactaaatcatactcctattttgaaaaagaaaaaagtctattactattaaatatatctgttagttgaatatcaatcactttttctaaagggtagatttggccaatgagtgatttttttttttttttttttttggaaatcacatctgagaacgttgtttagacagcttgacacttagactcatttgtgtaagtagtaatttattcatcatttgcatgtacttaactggacattatcatgatagcagttgtcataacagactattacaggatatgaatttagatattaccttaagatgtgatcataaaaatcagaataatatcttgaaaatatcaattttatggtgagaaaaatgacaaactgaataaactcttgactcaagaagctagacttttcacaacctcatgtattcacagaagtaaaaataacaactaataatgtgtccagagggcccacattgctcagaaatgaatacataagactttcttttcagcctcagaatatgatgaaaagaagatgaaccattatgatgttgcatagattttaatgaagaaaattcgttttctgttcctttcgtttgactttaagtagttgaacatcctgcttttttattttgtttgcaagaaataagaccattttagaaaggctaaaaacattaattacatttaggaactacaataatctgaaagtaaaattggatattaaaggacgtttttgcaatcctttttagccctcttctgtgtattatttttatcactgctcttaaaaatttgtattaatctttggttcatttctgccttagtatttctaagttaataatatattgaatgaaaaatcaaatcagtaaaaatccattttgtttcagtagtgagtgccttccccctagaaccaaaactaaataaatgtgctccatataaagcaaaccaggtacagcatattgcacgggtaactcacaattctagattcctctattaatcattattcagacatgcagaggtagcttaatttgctttaataagtgaaaacagaatctctttgagactgctatctgcaatattatactttgtcctgcattttcttggtcaaaaattgtattttatagccatgatatattttggcttggaatttgcttctttataagcctagttattaatagtcatcatttaaatgaaatgatatccattagccttaagctgcatgattacagagacttggtctatcttacgctgtatttccagtgcctagaacattccctggcatataataggtacccaataatagtttttggaataaatgaataaacaaatttgtgcaaaagcatagggcaaaatgctatcttttagatagcgtgacccttaaaaattattttgcaaataatttgctccatttgccaccagcttatttctggccattgttacttcttgtctctgcatacaaacactctgtgtctcttctcctttccacaatgaccacaagttatactgatctacttgagattttccaggtgactatttcatgtccagaggaacatgcctcttctagtgttcccctctgtgaatgatttcagtcaccttatctactcaggaggtctctcttcccctccatcagcatctttctctgcaccttccaaacccctatgactcaacttctcataatatggattgcattttttttaatgacccattaaattgtgtacctctgctaatgattgtgagtgtgttgagacttccatttttccagtggatgataggtatataatatatatatatatacacacacacacacacacacacacacacacacacacacacatatatgtgggcacagtatctagtggatataaagtaagtgttttcaagtgagtagtaattaaatctaagagttgccgagaaaatgccattcccgttttgtggacatcttcattctacattgtaaaggccacctcattcaagacccaccacaatcttgatcccagaaaacacccatgattcatcttttacagctgccctgtacttcatattttaagttattaaaggctatttgcttttcctcagacacacattaaactttcctacctcttaccctttgttcaagttctgaacacatatctttcttccccacactatgcttcctctttatcagtttcatgtacctactttccaatgtctagttcgaggagacgtttataaggctacatgatagaggttgcccctggggcgatgtgagaaatcagctccaaaaaggtagctacccggcaaaggatcttagtctgtgactctctcatggatgaacttattacctactgctttgcagagtctccctggactagcctgaataggaacttgtgtgactatatgtgaactaaaagaaggagaaatatgcctaaacttctcatccatctttgtaacagccctaaagtatgcatgttactatcccttttctacacaagtggaaaatatttgtaaatgaacttcgttacagtctaatatttgatgacttcttagttcatatcattatttaagtaacttttctttagtggaaaagcccaaaaattagggaggcagggagagagagagagagagagagagggatcatctgtaatctcagccccagcatctataatcccaatccctgcaagggcctctttgggcaaagaagaaaaaggcactgtgtttttgaagagatccccggtcctatgccaagcctaaccaatttggtagtagagcccaggctggatttcagttggtttgtagtcttctagtcttttcatatgtaaatatttttaatgcttttattcagtgttgttaaaatgccctccaaaagatgcactaacttgtgccaccaccaccaagcagaatatattttccttgaataggctacttcctctttttttcccactcactccatttttattttaaaaatccctggtagagaccaaaaactgaaatgttatattcttgcccaaagaatgagagatgcttcagaaattagcaaatgctccaatataaatcaagtgatagatataaataattcagatatgggataaggaaaatgggtagctttctcttatttaggaactctatgtcaggtttctgtgagaaactgtttacgaagcagtctgacaatagctattggtctgaagtattagtaattagtacagaagtgcctaattctcttgactgcttgttctttaataaaaatgtattgagggattatcatgtactatggcttggcatatactggtgaaaaacaataatgtaggattgccttaataaattttctggtcttgggaaggaacagacaatgaataaatgaataggcaaatatatatgtacttgcaaattgtgatcagggttcagaaggaaaatagggtgttgagagtcaaggaaaaaggagacactttacgtagggcaaccaactgggaataggctatctttaaaagtcacatctaactgagatcagaagtatatgaataagagccagctaggcataaagtggatatataaaactccaagcagagggaacagtgtatctgaaggttctaagtcaagagtaagcttgggccaggcacggtggctcatgcttgtaatcccaacactttgggaggccgaagtgggaggatcacttgagcccaggagtttgagaccagcctggaaaacatagagagatcccatctcgcaaaaaaaaaaaaaaaaaagaaaaagaaaaaactaacttaaaaatatatatatatcaatgccagtggtgtgtgcttgtagtcctggctaacttgggaggctgaagcaggaggatcgcttgagcccaggagtttgaggctgcagtgagctatgatcgcactgctgcactccagcctgggcgacagaaagaggccctgtctgaaaaataaaataaaaataaataaagaaataaaaagcttgatgagttctaggaactcaacattttctaacttcttattagaaatgccaaattctcaggcccaccttacacccactgaatcaaaagcactaagtgggactcagcagtctctgtgttaacaagccttccacatgacaatgagatgcacactattgtgtgagaatcactgccttagactgatgttttgagctatttaggggagggagagggcccattcagggacaatggtggttaacacatgtggctcagaccaagaaatgattgcaagcccaaaaacttgttaaatgtaaaacttcaggcgcagtggctcacgcctgtaatcccagcactttgggaggccgaggcgggtggatcatctgatgtcaggagttcaagaccagcctggccaacaaggtgaaacccagtctctagtaaaaatagaaaaattagccaggcatggtggtggtgtgcgcctgtaatcccagctacttgggaggttgaagcaggagaatcgcttgaacccacgaggcggaggttgcagtgagcccagatcgcaccattgcactccagccggggcgacaagagcaaaactctatctcaaaaaaaaagtaaaacttcatctgtctgaagtaacttctgaatttgaagataaacatcctcatggttgatattttaatggtttatggattattacttacttttaaggaagttaataggtttcattaactgccattttgcttcattttgtcacatataattaaaatttttcagacagaaaatattggtattttttctgtttccttagcaacctaaagcatgacctgcttaaatgacttatttgtgctcattaaaagcctttttgtgttaattgtgtatattttgtatttagcctctgtgaaacactcatgaactatctttttatttgttttaattgtgtcattggaaagcttgaagtattttgtggtttttttttttttttttttttttttgcttgttttttgtctataaaggggagataactggcagttgcagttaggattatagaaacattttcccaaggaaattaataaaatttgttcaagtttcttcttttacaaattgtacttatttttgattttttaaatagtggtaaaatacaaattacatgaagtttactatcttggctctatttaaatgtatacttccatggcattacatacatttacgttgttctgctgccatcaccaccatccatctccagaactcttctcatcttgcaaaactgaaactctatgtctattcaacgataatccccaccaggcatggtggctcacacctgtaatctcaacactttgggaggccaaggcaggcggatcacctgaggccaggagttcgagaccagcctggccaacatggtaaaaccccatctctactaaaaatacaaaaattagctgggcgtggtggtgcacacctgtaatcccagctacttgggaggctgaggcagcagaattgcttgaacctgggaggcggaggttgcagtgagctgagatcgagatcacaccactgcactccagcctgggcaacagagcgagactccatctcaaaaggaacaaaaaagaaaaaaccacagtaattccccattgcttcctgcccccagcccctggaaaccaccattctatttcctgtctataaatctgaatactcatttctatatcttctttggagaaatgtctattcaggttacttgctcattttttagtcaggtgatttgttttcttgctattgagttgtaggagttccttgtgtattttgaatactgaccccttaccgggtgtatggtttgcaaaatatcaattgctcctgctatgttcaacttgttcttaaaaataaaaacttttcctttgtggtcaatacttccctgttcctcatttccaaattttatacatgaaggaaatgtgagcacccagaaaagaaagaagatagacactgttaatatggccaagatataattcggcttttattataagaacattggagttacaagcttcatagaaagccatgtcctaaaagatgaagaattatgatcagtgcaaagagaaaatgttaaaaagaaaaagttatccttttatgtttgggtatatattctttttcgatattgtaaagagaaactagagttttttgttcttgtttttgagacagagttttgctcttgttgcccaggctggagtgcaatgttgcaatctcagctcactgcaacctccacctcccgggttcaagcaattctcctgcctcagcctccagagtggctgggattacaggtgtgcaccaccatgcccggctaatttttctgtttttagtagagacagggtttcactgtgttggccaggctcgtctgtaactcctgacctcaggtgatccacccacctcagcctcccaaagtgctaggattacaggcgtgagccaccgcacctggttgagattgttttttataaaaagatgtggattctttatggaaaacacagagcagttaattgctatttttttaatgtcacaaatttggaagcgtgttgagtctgagaagaaaccatagttaaaatataattactgataatcgcttgggaaataaaagccctaaatttcttcatgcctacaaacttaatattgttttcccaagatcttttttttgactttaacctttcttaagtgtttctgattatgctaaatctaggccattagttctgagtctgtttcattatttatattgttattcagtttactcgtcaaaagtgatcatgcccaaatatgaaagtttacaagaattgccctgaaaactgaacggaaggagacaacgaaaagaaactgcataatattttgccttcaggctatcacaataaaaactgttgctggaaaaaaatgcaatcacatcccttttttttttttaaagtacgtttcaatggcataatttattgtcgagaatgtctctaccagaagcataagtgatactaaaggcagagggttgtattcgctcagtctgcaaagtatcccctttgtcttagctccacacagtccctcagaatttggcagaaatgagggactcaactttcgagaaagggtgacaatcccagttttgttggagagctatgaaatagccccatagtgttagtaatgaaaattcacttaagaagtctcctgcaggcccggcacggtggctcaggcctgtaatcccagcactttgggaggcctacgtgggtggatcacctgaggtcaagagttcaagaccagcctggccaacatggtgaaaccccatctcttctaaaaatacaaaattagccaggcgtggtggcgggcacctgtaatcccagctactcaggaggctgaggcaggagaatcacttgaacccaggaggtagaagttgcagtgagccgagatcgtgccattgtactccagcctgggcagcaagagtgaaactccaccttggaaaaaaaaaaaaaaaaaggaaagaaaggaaggaaaggaaggaaggaaggaaggaaagaaaaaagagaaagaagtctcttgaaaaaaagaaaggaagaaagaaagaaagaaagaagtctcctgtataaaaaaaggaaagaaagaaaagaaggaaggaaggaagaaaagaaaagaaaagtctcctgaaaaaaaaaaaaaaacaaaatataagtgcttgacaactgaagttcaagggtaaaggctattgggaaagcagatgaagttaatctaagtaatggatgctgttggtgccccagtcagattcgttcactgggttggtgcacccattcctcagtgactctgagtattagctgctaaagcctcatggtttcacccctttccagagaacctccctcagccaaaaggaagccaccttgactggcatgtcccaccacaccttctctcttaaaaccaccaggggtacaaagggaaaacccctttgcctcatcatggcacctgctgttgtacaatttgtgatctgggaattcccatggggccagattgatgctggtctccagcccataccacatcccaacttaactttcttgccctgtcttcctgcttctctcactccctttttcttaagagcactcagactctgcttctcttaaacctggctgaaggcagtaggtatctgaaagaaaagctgtacctacattctgggcatcagagcagtcagggaaccaaccagaatgaaaagtcaaaaattacagataatgatggaagtctctgagcctgatacatttcatgaagggcttgcttacagctcaacttgtgtttctttttaattgtttcaacagcatttgagtagctcattccgcccaggtatttgagagattccagtaggcctctgatcctctggaaaaagcaagatacagtccttgactctcttggccccatgaggatgatatatctgctgagaaatgcaggagctgcaaaacatagctgggctgtacctgctgccaattcccgggtaattgcattctgtgagggcttccctgaaccacgaggaagagccccggaataagtactaaacaccagtatttataggacatgatttctaattgctcatccttgccttctcatgactagctcagcatgaagaatgctgggacttttctttcctagcacctcctctttttaggctgttttccaagagtcttggttaacaaacatttgtttgacaaggattcatggtagacagcaatgccattagtccctacttaagtaatatttgtaacataaatttctctgcacgtgtatgtagcccaagaataacacttcatttttggaacctagtaattttgaattcctagtaagtgagataggacgtctatgagttagcaggttaagattttaggaggaatatttaatatccctaagaagggaagtttttcaaacactgagtagcactatatatatttatatatatatagccagatttctatctatctatctatctatatatatatatatatatatatatatatatatatcacaccatttataaataaactcataagtggcaaatccagtagagctaatctgagcatcccagagtctcccctctctgtcgcttgtttgtgcagctactcctgctgtggccttttatggattatcctggacttctacaactgacccctctactttctctccatctacaagcttcattttgctttgctttcctcctaatccagtttagattccacagtatattttttcaattacatcctggctaatatcgaaactcccttatccctaaatgtgtgagccacagtcatctgacgaaaccccaaacctggatcaactgttttccccatgcttacatgcaacactgttggagaaaatgagaaagtcaggcagattggttctgctaaaaaatgttgaacctcatcctcaagtgggccctcaacactgtttgccaacctcattacatctcttaggtcaactccctctcacagtctctattacgattaattcaaatgttcccacttacccttaattcatgttttcattcagtgactattcattgcacaccaggcactgcacgctatgccaggcactgcagactatgccaggtctgttgattcctacttcacagaggaaataaaacccctccaagcagaattccctcaatttactctttctagtctttccaactgaccttctgtgctttgcagtaggaatgttctcttaactgtcaagtcaaaattcctccctcaaaaataagattcccttgttaatagacaattcctttattttcttagaaaagtagtagatgactataattttaaatgtgtatttgaacaaatccttagctacataaagataagcaaagatatgacaggcaatttaattttatatgaagaaaaacttattatatcagacttacctatcattctaaatcagtacttttgtatctataatcagacaacatttaatgaactgaaaattctgcctgtgagaaactagtcataataaaattagacttggtttgctctttcatggagaacatattccagatgtttaagtgattcaaagaaaacccacaatataatggctttcttcaatgttttctcacttactgcttccaaactagaaaaaaaacctaatgcaatcctgatatcacttaaatagcacctcgtattgctcagcgttaactgtgctttttgacattttaggtgtagtgtttaataatttaaacacaaatttatgtgtgtcatattaaaagctctaatctgtgaaatatagccaaaccaatgtcacatctatttaaatagcaaagtacctgtgttcaccctttacagggtgaaggtcttgtgactctgtgtttaggcggccatacttcttgttatgtatgctgctgggcactgagagcccacagtggtgagccatccttgggtggtaaaagctgctaccaaaacctaaatcaaatgccaaagtgaagactgacatgagcattctcctgcctccttttcctttttatctttcctaccatctgttatctcctttcttccaccttcatgcgttgagtgccctcatgatgatttctagctgactgaagtcctttagtctgctcaaccccatctagagacttccccaaagtgaacctttgcccccagttatctgtttatcaactgacctcacaccagtcaaagcttccattgtcaaatattttaacagaaatttaggaattcagattaaactgaatatttggcattttttcttttttttttttttttttttttggagacagagtcttgctgggtcacccaggctggagtgagtgcagtggtgccatcttggctcactgcaacctccacctcccaggttcaagcgcttctcatgcctcagccccctgagtagctggtactacaggcatgtgccaccacgcccgaataatttttgtatctttagtagagacagggtttcaccatgttggccagtctggtctcgaactgctgacctcaagtgatccacccatccacccacctcagcctcccaaagtgctgggattacagtcttgagccaccccacctggtctgggttgttttcttcatctttagcagttgtcttgttcacaactacttcaacaatatttattttctttttctttttgaagcaactctccagagtatttggcctggtttttatagaaataataacttttttcttttctttttaaactaatatttttatgatttaggaaatctttctttattaaattacataatcacaacagttactggcaaagataggtttgagaacatacacacaactgacggttgtaacaagtcaactgatgggagcagaaggtccacacatactgacaggcacctcgaacattttattgaggctgtgagaggttcccatcactgctgtttcacaaagagaatgaagactttggctaatttggtgagtcttaagtggagattagttcagagaacttccactatcattgcttgaaagaagcaaaaaaaaaaaaaaaaaaaaaaaaaatcccaagatcttatggtaaagtttaaagaagaaaagtaaattttaaaaagaaaaaaaaagaggaaaagggagagcattgcaattaattatgagtaccaaaacttatttttgaatccccttcatcctccaaaacattgaagcaggattaatatgtgtgctcaggaatttgggagagaaaatgaaaatcaaaatattctaataagagacatttgaaaatgtacattgtgtcacctaaagggaactgaaatctagctatggcttaacgaggtaggataatcaacttaatggcttgagagtcttgcttgtaaagagagatgattagcacaaaggactcacctgtatcactgaaagatgctgcctgctggcttgccctctctgcagaggttcctgtttacagtttcccctcacatgatatttatttgtggctactagaaatgcacgttattatccagaagagaatgatttcattttgtaaccgttgtccttgtccaagtttcccccattgacatttaagaaatctgttttctaacctttctattatgcaaaacaaaattaatatggatcatttccttttagagataagtattcatatatatggatttaaaccacctttctccatgggcccttattctgatacttttaatccatgtatttattcataaggaaatggaacaatatttactatccacccctataaaactttctgaatttcacactgattccagtgacattccactaacacgaagttgaatacagatgaatacatcacatatgattttttttttgcatgtgtatggtcagaaggggctctcttttgtttgtttttattaatatataattcacatactttaaaattcactctttcaaagtgtacaattcagtggtgtttagtatattcacaagattgtgccaccatcaccattgtttaataccagaacattttcgttatcgtccaaaagaaaccccctgattgcttaacgtaatgtttttaatgaccactttttaaaactttaagttcaacagagtgattatcacaatgttttgtattatctaagaactacacaacagtgttatgctctatacagcaccacggtttactgatgaagtattcaggttgatttgagaggataatgtcgttcttattttgaatgttcatactggctccttttatttggagtgggaggaaatgcaaggcttataaatgaggtcagtgtaaccaatggttttatcaacatagtgaaccagacagagaaataacacctgcccagatcaagcaagtcaaaacaacacgtatagtcaagtggtgctgtccttgtacacagacattacattacacaaactgttctcctaagtgagggaatttgtcccttagaaattgcttattggaacatttggacatcatgcatcatgttaaagatccataaatgccatctcgatagggtagatatgaggcgtggtaatatcctccccatatctgcatagggttcttctgctcaacggattgctatgatgtattgcatcagagactcctgctctagtgcttcaaagacagctgagaagccccacgggagccttctgaagtcattgctacaagggctaaaataccaggagatcaggaagtcattctgaggacttgacaaaataccctactccctaaatgaaactgttatgatgtggttggtgcaaagtatgcatgcaatattttatgactgaatatatctttctattgtaaaaaataaggatccatttctggttgtgacatgagtagaatttagaatccagcagcaatatatttttcttgttactttgccaatccagaatttcttaggggaagcatataacataatagttaagaatatatattctagaggcaggcaaacctgcatataggtatcccaggttcctcaatttttacccatgagagcttggcaaggtttgtttgttttgaaaacaaacctctgcaagtttgttttctcatgtataaaattagaattctccaactactggcctcataggattgttgggtagaaataaaatcagtttatgtatgaatagagctcatcatggcattaggcacctaggaagtgctcaacaaatagtagttatcattattcccccattaacaaatatccattgttataatactaccacaagagactgtcttagtctgttccagctgctataatagaaatgccataaattggatagcttgtgaaacaacaaaaacttatttctcactgttctggaggttgagaagtccaagatcaaaataccagcagatttggtgtctggggaaggcccattcctcatacaaagcaccttctcactgcaccctcacatgctgaaaggagctagctagctctctgaggtctcttttataagggcgctaatcccaaaaatcacctccctaaaggccccatctcctaataccattgccttaggtgttttgatttcgtttcctttttattttttaggatttcaacataggaatttgaggggggacacaaacattcaaaccgtagcatagagcaaacattactggcactgcaccctaaagagaataagcccaggtatcagttcttcttgttttaaatattctcatcttccaatttgcttttgactattgcacacaggcacttcgaggagaaattgcgcctctgaaagagaacgtgagccacgtcaatgaccttgctcgccagcttaccactttgggcattcagctctcaccgtataacctcagcactctggaagacctgaacaccagatggaagcttctgcaggtaagcacattgtaaacattgttgtcctttgttacagtaaaataatatacagataaaatttgtaaagaacaatgaaagtacttttttcatgtaatgttcatggtaatatttgtgaggataggatattttatattagtttataattcccatctaaacattttcaaattattaatattaattttggaagcaactaagacttagtatatgtcttagtctgtttagtgttgctataaaagaatacttggggctgggtaattcataaagaacaggtgtttatttggctcagttctgcaggctgtacaagaagcatctgcttctggcgagggcgtcaggctgcttccactcatggcagaaggcaaaggggagctggtgtacaaagatcacacggcaagagaggaggagaaaaagagggaggggaggtgccagttctcatgaaaactgctagagcaaaacctcgctcactaccgtgagaatggcaccaaaccattcatgagggattcactcctacaacccagacaccttccactaggcctcaccaccaacacgggggatcagatttcaacacgcgagttagagggaacatccaaactctgtgtagcagtattcttacgataaacagaaaataatgctgaatcatgatggaagatgtgaattgccaccatgcagttcctttgtactcttactgcttggattctcaaaaacatctttccctttagaatcctaatttaaacaagagtcaatagtaagatgtgtccaaaagtcatttaaagaaagagcatcctatcacaaacttacatgtggaagtttttcgtaggtttgcgtaataaatacaggcaatgtaagtgtgctgctcaaggtcacacttactagccatgggacctggagcaaattacttaacctttctgagcctcagtctttcatcaaaaaaaaaaaaatgcgataataaaattctctgcaatatcagtttattattaggatgaataagtcaaaataaatggaaagtgctcgggagcgaacatgccaaatgataaacactctacaaattctagctcttgatgttgttattattattattattacagtacacaggttttggaatccaacatattagctgagtgaccttgaggccacttaatctctgtggttgtccatttactcatctctaacatggttactgtaacatcgaatgagttaattcatgcagagtaatggttgtagtggtggaagaggtgcgtctaccttctcagtgtgaaggacaccatgttataccccaaaaccctaaaattagtttaaccgtagaattagagaatcattttctctcctttccaattttctcctttccaacaggatgcagaaggtatgcctctgaggaaactgggtttaaaactatttggttttaactttttaataagaaaaatataataaaccaaatcactttcctattgtcagtccatttaggggtgtgattgagaggcctgttaaagaattgctagatctttaataaagataagttgcaaatcccagacctcttgagatctcacataatttaattcttgttgtgatggatagtcctgaaagatttgtattctagattgttataagtggcatcgactaaagcaaggcgatatagctaagtgattatatgcctttctctgtttgctccatagtagttgagtactattaaaattttatctgttccatccttagtatgtttttcatcttaagtataaataaggaaagtaataaatgtccaaagaaaaccaatggccacattagtcccatataagtgttctagaagtatattttataatttcttttagagagcagaatgccacgtttgctttcagaacgtggtaaaagatttgtgacagtggcaggtagatttccaaatgaggtcaaaggattatgactagtaagaaaagtttttttttttttaatcaatgctaagtgatccattctagttgcactatttatttgcatttaaggtatcaaaaacagtaaatagcttactatgtagccattctttacaatgagtaaaaacttggttataagtacaggaaaacacatgtaaggagatagtatgatatagcgaaaagagcattggattgactattaggaggtctaacttcaaacttaagctcagccattatttgaccgtgttattgtgagaaagccatttaacctctctcagctttaattctcctcatttttaaaatgcagaaatctattttgtctaaggtcacatacagttcaatcttatgattctgtctctagatatctgggggagatacacatttgacagaatttagtttaaaaccaatgaagttcctttctttattcataatacaaatgtggtttgttgaaattatatttctccttgtataactctaacttttaatctcttcttccctaaacccacatatacacagccttctcctattaaacagttcagtttgtggtgtctgctctatattgtagcaaatttcatgtttctatttttgaacatgaccttaaagatatgcttaaaaagtgtttttagcagaaagctgataaatccaaggttttggtttgcatataaccgagtcaagttagttccattcttttctttgatagtaattctgctacattataaatgtgaggccttgttcagaaagagaagaaagcaagaaatgaggttcacatcaagcaatttttttcccattactggaaaagcaattcatacatcctgttgagaatattttatatttagaacaatgtatgtgaggctaacgcattatccaagttctatggcgggaagcttgagcccaccaccattatgacatcatatttttttaaatagtaaatgtcaaaaaagacatatttctatgaaaataaagaatttagtcacaatgctatgtcaatctttaaatcgtgataaaaaccaagtacaagttcatctttgcctctgtccactaagacaaagaacaatcaaaaagtaaagaactctctgggcatggtggctcacgcctgtaatcccagcactttgggaggccgaggcaggcggatcacttgaggtcaggagtttgacaccagcctgaccagcatggtgaaacctcatctctactaaaaatacaaaacttacctgggtgtggtggtgcgtgcctgtaatcctagctactctggaggctgaggcaggagaattgcttgaaaccaggaggcagaggttgcagtgagctgagatcgtgccactgcactccagcctgggcgacagagccagactcggtctcaaaaataaaataaaataaaataaaaatagagaactggagtagtagaaaggcagatgtaaacctgagaaaagaagaagagtcttaaatttgggcaaaatagtataatagaaagattagagttacatactatcaggccgtgtctacttgatatcagaatatcctgggttctttgcattatccattcatttaattttcaaggaaagccatgctagttttttagctgtctgtaatatcagtcaaaatggtgaaaccagttaagggatgtgagcaccaacaatacagtcaaacccagtcacaatttacctatgtatagaatcataatgtatagagaattccaaactgactttgaatcttctaatagaaatgtaagagacattggtttgcctgtttgaaattttctgtgggaatgaagtcctattttcttcctcaaagtagacacattggtatgcatgttactatttgaccatttgactttttgtggtgtaggaaaccatcactccttgcagttagaaaaagtcctcatgtgcattctctcatctaagaatcacaaccttgtgattttgtattatgattatgattacctattatcattattcccttttacgtgtaaggaaaccgaggcttagaaacatgaagtaccacagtcacagtcacataacttgtatcagtcaagatctgagtcaggtttttcgaactgctattcccatgctctttttgtctcctcttctcaaaatcctattacgtttggacttaacaaagcaataatggctgggtgtggtggctcacgcctgtaatcccagtactttgggagggtgaggcgggtggatcacttgagatcaggagttcaagaccggcctggccaacacatagtgaaaccccatcactactaaaaatacaaaaattagctgggtgtggtggcgcacgcttgtagatcagctacttgggaagctgaggcaggagaatcgcttgaacccgggaggcggatgttgcagtaagctgagatcatgccactgcactccagcctgggcaacagagcaagacaccatttccaaaaaaaaaaaaaaaaagcaatactttaaaactattttggacaatacaggtgtaaaatacttcacttttttacatgtatcttcttttttgaaatgattcttaggtatattaacttttaaatcttccttttataaaccaatggattaatgaacccagttcagtgtaccccttagaaatcacacttgtttcaaatataaaattttaaagcattatattcctcattgcctttagaactcagcaattgtactaaaatcagccaaaagtgatttcagtgaatcagctcttaaagccaaactaatgctaatatttgaccaagtagaaacgaatatctaaaccaggtgagaaaaaagttaaaatgatgataaacctttctaattttgaaatagtacacacactgagtaatgcagtcaatctctttattcaccaagcgcaagtagtatataaaggaatattataccatttttctttactcatgagtaaacccacaaatagcacaaaagctgcaaaaacactttaacataaggagtatttgttttattgactgtaggaactcatggaatgcaaacacctttaaaatctgaataatatgaaggcatttccagctattagattctttacatatgtcaaagaacagtatcataaattatgtatgttttttaaaggtttcctaagcttcttccaaagtcatgtagacatcattacactccatctgtatacctctgtggtaacttgctgtcgcagggatctagagcctcatcttttgcaaacttcattccttctttcatccctttgttctttcattcagtcagcactgattgagcatctactgtgtacctagaagacattgtaatgatcctgtttggtccaaggacatactaaacaaaactccctttactgcttatgctatattaagtaaagctttaaagatgggttctcttttattacttccatgatggcccacccctctcatcctttctcagtgttaaaaaccagaaatatacatacttacatactatcataacactgatactacaaaagcagtacccattattatctctggtttacaaattattcaataatttcttactggaaacttggtctatatagtcatagtagtaagctttgtgagaggatgtgatgggatcatagttagctaaacaataggagtatttgtgtggcttcattttaaaaaaactaaccagtttttttccaacaagcaattcttatatcagaaccatttatattctttactttggtgagataggattttctaagcaggtcttttatctgtatctatgtatgtttgttcttaccatcattgagcacaggatttgatcctttaaatgtgttgacagattttgaacattttcctcatatctttcttttttgttttttaatgatcctgtactaatcattttgcattatggggtcacttctggacagagagcctagccatctgctcttacaaataatgtcggcctatcactaactggggataaggagaagacatctaccgatgtctttctagcatgtccttcttgactttttctttctttaagaagactaaaatgattcagcttgtggttctaccacagaactcaggagaaaatgataaatatgaggccattctccaaataaatatgttttcctacattagtggttctcaaattttaacaagcatcaaattcacctggaaggcttattaaaacacagataactgggctccacataccaagtttcaaatgattcagtgggtctggtgtggagcttgagaatctgcatctctaacaaactttcaagtgaggctaatgctgctgaatcatggaccacactttgataacccctgttctatgttaagtacttgtcaggtacagacaaatttaaaagttaaaaaaatatatatatgacttctgtaagacactgtgaagggtttagactctggggaaattaagtataatgccatcccaaaaactctgtgttggaggagtgttcaagtgctgcaggatcatggagaaccaagcacttaacttttctatgaggcagaaagaggaagataaagggaaacgtggaggatgaagggaaactgttaatagatccccagaaacacaatttgctgctatatggatttatatttactgtatttcaaatcacatggtctagaactgtgctgtccaatatgatagctacatatggccattgagcccttcaatgtagccagtcgaaagtgagatgtgtagtaagcgtaatatatacacatgtaatatgtatatgttatatatatgatatagatgtaatatgtatgttatatatatgatatatatgtaatatgtatatgttatatatatatatatatatcaggatgcaaagacttagtaccaaaaaaagaatgtaaaatatctcattatttttatattgattacatgttgaaatgatagtatttttatgtatttgcttgggtaaaatgtcataatgaatttcactcatttattatgattattcaaacttggttatttttcttgaaaatgaatgaagtgagcctgttgcttcggctacaacaatgggcagtgtttctgcaaaatttttacatgtgcctactagaacatttaaaattgtacatgtagcactcattatatttctgttggatagcattggcctaaaagttttcaaaatctagcatggataagaatcacctgcaaagcttgttaaaccaatccgcccccagaaatttagtatcgggtgaggcctgcaattctgcatttctatcatgctcccaggagatgctgtctatttgtaaccacatatagaaattcattcccaaactacagatgatagagttttacagagaggtgcaaaaatatatttttgcatcaagcattgtctgtagcttgaatacaaaattatgttgcccatataccactggtttttgtaagtaaagcagttgtgttacaaagcatacaagtttttatcagctaatagccttttctcaattagcagatactaagtagtacttttattatgtggcaattctccagtttttggaatgttattgagaaatacacagggttaaaacaaattagaaagcacctctcccaaaatactgcagtaagatgtaggaaaaactgctctaacatattctaaactataggttgctcttatgtaaatatttcaactataatatctagtctgatgtgcccactggccagagttttgtaaaagctaaaagtaaaggaaataaaaaaaagaaagaagtatgtgtttgtttttgaaaaggttaggtcacagaaggatttgttgatattaggaatagaatgacccgtgaaaaaaggacaattaagttccaggaaaacatcttttcagtaaggagagaataatcatttatgcttaacctcaactctgttaggaaaaaaaggatgtaaacaaaaccctttaaagaattgaagaaggagagtataaatttaaatgcccaggttagtgaccacccttagagcatactgaggtcaaagcgtactgtcaagcttaagaacatttggttttcaatgtttgtacaactaattgtactttagtcaagaggactgttatcgaaattgctcaggtagccttgaaactaatatggcccaaatattccagagtctgtctttctcaccctaggagaagaatggtctggttttcaagggaattctctattttttttttttgaaggcatcaggatgtgtgaaactacagggggataaatgaacgatgtacagaatgtgatgaaaaaattatatgaagtataaaatgggaatgaagccatcaggagccaaagaaatatttatgaatttaagagaatgaaaagcatattattattttcagatattttataaagtgaacccaaatcattataaagtattaattaggctacttgattgcttgatctttatatactaatttctaatttgttttaatcgggaactatttttgctagttctaaggctagctattatggtaatccatgtaagtgtgtttattattgtttttaaaaatggaatgtgttcctagtaaatgtgtttaaatagcaaaatgtatttatgcatgcatgtatttattttagtttcctgagacctctagttccttactagaaacatgtatataattccaggcatttaaaattgccatgatggtcatgttttcttgtccttttcccttattctgcaactgacatttgcccttgtctccaatttctcactgctttattctttgttcttgtaagtgttcttgtctctctgggctgacctctctccttccctggagtttgaccccgccccaccctttcttctgcatttgtttgcactggttgttttcttcattgcctttcccactgccccgctgcgctgcatgtgaaacactccgccagtagctgctcacagttcccatgctacatcatacccagcattcaaagagctgctgttctcacatggccgccagtaagattcccgactcctccttcacagcacattcctctagaaagtagaaagaatcccctttcaggccacatgagaagctgcgtgttaaagccaactccataaaggggaatggaaactagcgtatgaaattcagaaatgctacttttaaaggtaaataccacaaagtgaatttcaaattcatacagtttatcataatacttctttatttttataaatgctataatgtccttaatataatgatcactgtgatataagttgtcctctcccttaatatattaattaatttactaaaggagacgggagggtggaaatataataaattagaagatgattcttatatcagaagtacagcctttatacatagttttactttattcagacaatcaatgtagtcatatggtataaatttgaaaataattttagtgagcattacgcttactgagattaatagtgagaacttacctagcacttactgtatgccattcacaattataagcacttttgcatgtgctaatgcttttaagcctcacgtaacccagtgagggaggtacaattttaacctcattttacaggttagaaaaatgaggagcccaagggttaagtgacttgcctgtggtcatatatcaggtaagtgagagagccaggatttgaacccagacagtctgcctggggaatctgtcagaactcctaactatgcagtaccactcctctgataaaaagttgaattgacatgacaacatttcctattcatttatgattcgaccctttaaacaaaaagaacagcatcattctcacatttattaatttgtcaggaatcacctggatcatgagttgaggaaatttaaagtaggagggttgtatgaatttcagaccacgatctcaagaattgcctgtttaactcagagcctgaatcattcacagactaaaaactagaatcactcttctgtaggaccaagagggttgaatcatcaaagtcttgctgaagtgaacggaaatcctcctttgttcaatcattcattcaataattatttttttctggtgtctactctttaccaaactctgtttgagatgatagggattcagtcatagacagaccttctctgccctcatggaggttatggtttcttgggatgacagacagtaattttttaaatctcataaaataattacaaatgtgtcaggaaagaaaatacaggacactaccagaatatatagtaaggacctaaatgtgtgtgtgtgtgtgtgtgtgtgtgtgtgtgtgtgtgtgtgtgtgtgtgtgtgtgcgcgcgcgctgcagtaagggtgagaggcaggaaagggcaatcaggacaccctcccaataaaagtgacctttgaccgagatctgaaggatgaagacaagctgagtgactcttctattcatctatatcttttgttttaaatggcctgaagcctgggactaactaaacagggttgtaaaattccagtatgtaaattgaataactagggatcatttgaagtaatggactgcagagttaatgtataattaagtcacatctagggaagatttcccatcattatcacagagagcatcctgtttgctttcttcacagcacttacgaaaatctatagctatgtgtttggtggcttgtttaatgaaagtctgtttcccctatctgaatgtgagctccataaggacagaggccctgaataccacatctactgacatttggcagtgtctttcatatagtaagcattctataaatgtcttgaatagatgaatgcataaaactaagttaaaatgttactgaaaactataaaaataagcagaaagttataccagaggagaaaaattaggggaaaaaaactataatttctgaagacgtagtacttacatctaaatttgtggcttcataaggttaaccaacacttaaatagttttgccaaaactccaagaaaaaaatgaccgggtgtcgtggctcacgcctgtgatcccagcactttgggaggtcgaggtgggtggatcacctgaggttaggagttcgagaccagcctggccaacatggtgaaaccctatctctactaaaaatacaaaaaaattagccgggcatggtggcagacacctgtaatcccagttactcggaaggctgaggcaggagaaccacttgaacataggaggcggaggttgcagtgagccgagatcatgccactgcactccagcctgggcaacagagcaagactctgtctcaaaaaaaaaaaaaagaaagaaagaaaaaaaagaactaccatttgacccagcacttccattacttggtatgtacccaaagaaatataaatttttctaccaaaaagacgtgcgctcatatgttcattgcagcactattcacaatagcaaagacataaagtcaacctaggtgcccatcaatggtggattggataaagaaaacgtggcatatatgcaccatggaatactacacagctatgaaaaagaaggaaatcatgtcctctgtagcaacatggttggaactggaggtcattatcctaagcgaattaaagcagaaacagaaaaccaaataatgcatgtgctcacttataagcaggagctaacctttgggtacacatggatgtaaagttgggaacaacaggcactagtgacaagggcaggagggtgtgggacaagggctgaaaaaactacctatcgagtactatactcactacctgggtgacaggttcaactgtactccaaacctcagtgtcacacaatatacccatgtaataaacctgcacatgtaccccttgagtctaaaataaaaattgaaatctaaaaatataaaatatcaaatcataaaaataaataagaaaacaattgaatctactgatatgtttcattgcttttaaaatatccactttgaattactgaatattttaatatttttagttttacacttcagcacagaaagtccagaaatccaacccttgagtttacaaagacaccacatgatagttcatagttcacacagctagttagttgtggaactagaacccaaaatttgctctctatgtctctcacataccttttccctttattctaataaaggcatttgtcagtctaaatgtacaatattcgaagacattttttaaaggaactacttatccaaatcccacctgtcttacaaggtccatgtgaagcaatgagataaggtctgtgaaactgcttccgaaactatcaaatgttataaaaatgttaagttttattattagaactgcagttcatctctatgaaacctttctaaactttctcacttttctgaacttgactacgcagcgtcttttctaatctatttgttctccctttataagaagaatttaatcctttccgccctgctgggttgtaagaaaaaggactctcttcttttctataatctattgatatttgattatattacacatctaatgggttcccaataaatacatagtgaatagaattgaaccaaatttctttctagacatgtgaaaaaaaatcctgatctttaaatagaaagggtactttcaaagattatatatagaacctcttggtattttgtatttgcaatgaaaatattttaatttgggccaggtgcggtggctcacacctgtggtcccagcactctgggaggccgaggtgagcagatcatgaggtcaggcgttcgagaccagcctgaccaacatggtaaaaccccgtctcaatcaaaaatacaaaaattagccaggcatggtgacgcatgcctgtaatcccaactactcaggaggctgaggcaggagaatcacttgaacccgggaggtggaggttgcagtgagctgagatcatgccactgcactccagcctgggtagagagggagactccatctaaaaaagaaagaaagagagagagagaaagaaaagaaaagaaagaaaatattttaatttgtcttatgttcaacagttgcatcatatctgcatccttttgttaaaattgaacaggcttctagtttcatataataatttctggccaggcgcagtggctcacgcctgtaatcccagcactttgggaggccgaggcgggtggatcacctgaggtccggagttcgagaccagcctgaccaacatggagaaaccccatctctactaaaaatacaaaattagctgggcgtggtggcacatgcctgtaatctcagctactcgggaggctgaggcaggagaatggcttgaacccaggaggcggaggttgctgtgagccaagatcacgccattgcactccagccggggcaacaagagcgaaactccgtctcaaaataataataatcataatcatcatcatcataataataatttctaccaacagctggcaggaaaaaaatatgagagcatagtcatgaacttcagattccactccccttacttttggcattccattcctctgaattatagcttatatttctttattatctcagtttgatttagtctttctaaatattcacctctgtttccatccataaatatcgactgaactaccttttaatatactatctttttgtaacagagaaaatcaagtgtaggtggattattgtaagtgacactgaggaaatataaaaagaccttgacttgtccaggcgcggtggctcacgcctgtaatcccaccactttgggaggccgaggcgggtgaattacgagatcaggagatcaagaccatcctgaccaaatggtgaaatcctgtctctactgaaatacaaaacattagccgggcatggtggcaggcgcctgtagtcccagctacttgggaggctgaggctggagaatggcatgaacctgggaggcggagcttgcagtgagctgagatcatgccactgcactccagactggtgacagagtgagactccctctcaaaaaaaaaaaaaaaaaaaaaaaaaaaagaccttaacttgcttcaaacaagtcaggacccccaattccaattcttaggtctggcattcccatcagacacttaaactgtaggggcagtaaagttgcccatgtggctacagcttttgtggctgtgctgtacttgggaattttaatgttaccctctttgaattaggtccttcattgatcatgcatctcaaagtatctcagtgccacataaaaattttctttcagagtcatattttcccattatgaatgctacctactgcttatctgttgagtgtacacttttaaaccttctgtgggtggtggcccctttgccactgggtgagttagatgctgatcctggtcattatcgctgcctttccagccttttctgctcttacaccaagcacaagaattctctgctgatagtcaggatctagggctgggaaaatgggatgagttgtcctgttagacaggcccaaaaggagtattgtttaatccccagggtgtggggaagaaagatactcttgttttcttttccccaaatgtgtccatatacacccttctcctttgctggcagccaccaggcttgttgaggatctaccctcctctgcatatcatgtgcatcaagggaagccccaacccaagggaatacataatgatagtcctgagctatttcatggtgctctcgcagtcttgattgccctcttcggaattggacatggtcatattacgcaattttaggtaataaaatacaaagggcattcagctaagggaccttctgagaaaggtttttctcgtctagagaactaaacaggcatccttctccgggcactatgcgtagttctttattctacctggaacattctttctccagaaatctttgtgactaactctgtcatttccttcaagtcttattcaaatctcaacttaaaaaaaaaaaaaaccttcttaaaatttgaccacactaattagacagcaactgccccatctccctcttcccagccatctgaatccatttcccacttacctttttatgatagctcttctaggaaggcactccctcctccctgtgaatcatgtctccaggcaattgttccttgtgtagaggaacacaccaaatctgggctgctcctgtacaacaaactgaaggaggtagaattgattctgcaagaagttcaaagctaaataagaaggagtcttgtagcttctgtcttggtcttctggaatgctcactctggggaaagtgatctgccctgtactaagtctactctaaggccactgtgctgtctacatgaagaagccacaaatctaagctagccacatggggaagctgcatggaaagacaaatacgtggctagcccccagctgttggccgaagatccgcagccatcccaagtgaggagccagatgtacaagtgaaaaaactgtaacagccattccaatggagccttcagatcaattcagctttggctactatctgactgcaaacacatgaaagaacccaagcaagaaacacccacctgagcacagtcaactcacagaaccatgagcaatactgataaatggttatttttagccagtaagttctagggtgatatatagcaaaaggaacatctgtcctgttttttctggtttttcctatcatacactcattctgcaggattaacatgtgtaatatactttttttttttttttgagatggagtctcaatctgtcgcccaggctggagtgcagtggcatgatctcagctcactgcaacctccgcctgctgggttcaagtaattctcctgcctcagcctcccgagtagctgggactacaggcatccaccaccacgcccagctagtttttttttatttttagtagagacggggtttcaccatgctggccaggctggtctcgaactcctgacctcgtgatctgcccgccttggcctcccaagtgctgggattacaggcatgagccaccactcccggcctaatatacttttttaaattgtctttcactatgagaaggtgagctccatgaggccagggatattgtctgttttgttagctaatgtatccaaattacctaagaatagatcttagcgtggtaaatatttgttgaatgaacgagtgaatagatcagaatttcagtagctacgttgtgagtatgtggacagttcaccaagaatggcagaatggaaggatgggaggaacctggaataatgtcattgtgcttctggattacccagtcctggagcagctttgcctctgtgggccttgactagtcaagacattttgtgttgggtttttatgttaattccatttgcatcactataaaggaatacctgaggctgggtaatttataaggaaaagagatttcattggctcatggttctgcaggctgtacaggaagtgtggtgacagcctctgcttctggtgagggcttcagcaagcttacaatcatggtggaaggtgaaaggagaaccagcgtgtcacatggtgagagatggagtgagggggtgggaggtgccacactcttttaaacagtcagatcccacatgaactcactctgagtgagaactcacttattactgcaagaatggcactgagccattcgtgagggatccagccccatgatccagtctcccccaccgggccccacatccaacactggggattacatttcagcatgagatttgaagggaacaaacatccaacccatatcagttttctacaacctgcagcagaaagcatctcatctggcacatggtcttgcaaataattctgacttagatgcatgggactcagatatgactgaaccagaagataaatctaagtagcagacaccacagtattctcaaaaccactctttctctttctcttgttgaccgaggcttttctactgagcaaagcacctggtttataatatgttctttcattacgccttctcctaagagacctccttagtgtccctgcaatggatgtctggggagccaccaatctcttagagatgactagacatgtagccccagaaatggttacaccttgagcttttctctcagtgcagatgagatacattgcccatcccaccaatttgccacatttatctaaatttctgtgttaagctgggacctctaccactcaagctgggatgcccctcaccaccaccacactgcaaaaactaaacatttttcattagcctcctacttgcaattaagtacataaaacctgcaaaacaagtaataaaattaaggcactatttggttaatgccttttctcagaaatcacttttgcatgaagttcagttcagtattttatcagtgactacattagtctcgagaccctctacccaataggagggacaaagatgtacatgacacaggctcccttcaaagatgattaatacatgaactacatacagtattacaagggctccactagagatgtgagccccccagaaatgatattaatgtgcagaagagttagcaataaattttgcacaaggggtgacatttgagcttagactcgagcaatgagtagggttccaagaggtaaagaaaaaaatggaatggttttctaggaagaaaaccaggtctgggaagatctgatataacctgaggtagtttataagtctggaatgactgagttatcgggtatatggtggggaaggcagcagaggtgaaataagtaatatctaagcaaatgaaaaacatgtaattaggggagatgaaatataattaaattatttaccttaattcctcttttgactctttacatttgtcattcataaggaaacaatttcactaagattgttttgacctttttaccttatttggccaagtaaacaagggacagaaagtttttaatgtaaaatattcattcaacctgaaagaacattgatgattccagaccatttaaagttaaatattttagagttctcaattatttctatttggatgagtagaaccttttttcagacttcaggaatatatgtttagtttttaacagactaattgttcctgctttcatgccagcctcatgggcatcagcaggttcaaggttagtaggtaggaatctgccccctaagaatgcagcctaagagttaaggaatgcatgattacccctgtaattacttgagaggggctctgaaattctggcagggttggtgaggccaccagataacactgatcaagaatgtacacgaggttaggaattcagactgtagctgaagtggggagttcgggtaaacaggctctgaatggaaaagatcaggaattcaaatagacagttaagtcaagaaaccaacatcttagaaatgtaaacctcactttaagtcaaaggctctccaagctaagacttcataatatatttgccaaggcaagagctagtatctgcttacctgagtggtcctggagctgcggccagttgaaacaggagattgcagatggaatgtcagttagaatactttcagaggccagtaacagatacctgactttaaagttcttaagtttgtctttcccaaggttttctggtcataagaatcaccaggggcacttgattaaattattaattcacaagccccttcactggagattctgatgcaatagacttgggaatatatttttttttaacacgaactccagtggaatcaggcaagaagtgaaaaccctatcgttaataatagacacattagaaataatagagacatttgataatctagcacagttcccaaactttagtatgcatcagaatcccctgggggcttgttaaactacaggctggcaggctgctcccagcgtttctgatgcagtaggtccagcgtggagtccgagattctacatttctagtaggttgccaagttatgctgctactcctgtggtcaggaactgcactttgagaaccactaatcaaaataaactgaagtccaaagaccatcagacctagagctggttaattcaacagattagctatatcaagacttgaggtcagcttctctgggattctcttgtctttttcctcatggtcccaagatggcttcccactgcgccaagcaacatatccgcagacaacaataaccaaggcaagaaggaataaggttcaaggataactgtattgtgtgcgtgtgtgtgtgtgtgtactcatgcctgtgtgtctgtgtttggaaaagcaaacgtttcccagaagctccccaacaaatttcttcttatgtgtcaactagaactggatctcactgaacctctttaagccaatcactggctatgagaaacaagcttactgtgattggcttagaccagattttaattttttcctcagagctgtgtcctttgttgcccaatatctgaacataattgagcttctttaccaaggaacaagaagtaaatagctgttagttaggcaaatagctgggtatgtccacaaatgggttctgaaacaagtgtgattataatgaggttcagaattgaaaatattagtacaaatgctagtaaataatgtatgatattggctttcttatcaccatttgcaacagaataacagtctcatgaagaatttggcacagccattgtagaaaaagtgccttttcagagctcacagtatgcatgtactcatcttgcttttattatacctgtatatggaattgcaagctgtcccttcaggtaatgaaatttagacaagttggaacctgtataacagcaaatcaatactgaaattataggcaaagcctgtacttgtgcagactaacacataggatagaaagactttgtgatcaaaattcaacaaatcccacatttataggtatccaacatagagagaaaactatatatagtggtgtgtctttttatgtgtttgcgtttttctccttattcattcctgaaagtgtattttcttttaacagactcacaactcagctacaccccatatgcccacagtcaacacagtggaaaactgagttgtttatttgagcctcaagtcatccaaatacttcgttaaacgttgtagtaaaaggtctcccctgaattcaaggaggatgccctaagttttctgcatccttttgatagaggaaagtattaactaatgtcagactatctgttgttttattttcctttacagcactagattttgttaaggacattgataattttgaaagagaagctaagctaaggtgacaaatatatcttctgttggtcaatatctaaaattatgtattatttcttttttgactacaccttacagtggttagtttgcactttacgtaaaaaactgatgtctaccatcttccatctttgtaagcaccatccagcctaatagttgttggtttgaataatgccacaagctttgtccagaaaccaaaaacctgatttccaaagactagtctatgtagctgagcccttcattccataatcattaaactatggttaggacacagtatccagtctcccctcaaccttgtccaatcacagtctatgcagagatcatgtaactcgattaaaatctagaaccatagagacatttcccttccctggggcaaatgggaattgcacatgggggaaaatggtgtggataagcaaaaaacggaagtttccaaagtgcaacagaatattgataattttagtacatttcaacatacagtgagtgtaatgacggcattttcctactgcttccttagttgtgaagattttgttttttcttctgggttcactgccgggaaaagagcagaaaatgttttagagcctctgccagcagagggggcatttaccatttgtgcataaggtctctggcactgtgccctggggttctcttttctatatgtttctaacagtcacacacagcagtgtgactgtttacagatactttaccgtcttctctgattgaagcagggactggtttgccagcaacttttggttgtttttgtttttttgaagaccatgcaactaacagatgtttgttgttggctccatatctacattctttgaaagctggagaatcaaattgctgacattcagacaacactaattcccatatccagggagcctaatttgccgtccctgagatcctgattcctggtgttcacgggtttaaaaaccatttcagtgacacaatataagaatgggcttgggagatgcagcgctgtctccactaaagataatcacattttataaacatctgcgtcattactggtatgattcatctctaagctgtatacagctgtgtttccagtttcaattaacaatcccttaattgcatatccatctcatgttactaatttagttaatttattcataattaagagtattctgttttctaccaaggtttgtcgagctcagaacattataaagaaaaatattttaaggcagcatctccgagggattttgtttcttataatcacatcacagtaaaatgtcattcatgcgcccaaaggaagatgaattgctaagggatttttttttccagtaaaataagaagctttgggaagctgcagtgtgttgtgtttttaaaccaagttaaatgcgatgcattttgttcttttctttctccttccctgacatcctctcaaaaaaattatcattttatttgtattattgcttaagtatcacagcaaatccagtcaccagtgcaaataaaactgtcattaccctgtcaggtaatggtgtctcttaaaatctaagctataaagtctgtacattttagaggacattaagatcaagaatttttaaattgcctaagtctaagcaagtggagtacacccttgtggaaaatggaaggcagatgaaaacatgatgccaggcagtgaattcattttagtttgatcttttctacaaaaatacatatatccgtgcagcaagagtcttgcctgtgttagtacatgtgtctgtgtgtcattcaaagcagcaataacaaaaaattaagaccatttctcactttgtttattgttcaagaactcccacctatagccttgacctgtgtttgagcttaaaaaaaaaaaaagtcttataactgcccagtggtttggagattttacacaatagaaataataagccatcttttgcctcacatgaattctactaaaatcaaaactccataggatactttccaaagtaactggtgaaaggaaaagtgtggtagtataggtatgcatattatccccatcactttatttctgagctcttctattttttaaaaattttaatttgtatcttaaaagggcaaaacataagaagaggtaggagtattctaaatttcagtgacaacaaattcatttattttacaatttaaccattgcccgtcaacatttacttaaaatttcagcatgggaggttttaaacacttctagagtcccatcttaccccatttccacgatgcttttcttctccatgtgttgctgcagtttaatattgtctgcgtgttttaatatgttaaacgagttaaacatagagtaggaagttaaaactgttagcagctatatgtttcccaagattgatgaaaattcaggtaacactccaacctgttaaagatacctgcaatctggccaggtgcggtggcccatgcctataatcccagcactttgagaggccaaggcaggcagatcacctgaggccaggagttcgagaccagcttggccaacatggtgaaaccccgtctctactaaaaatacaaaaaacatttagccgggtgtggtggcatgcacccatagtcccagctactcgggaggctgaggtgggagaattgcttgaacccggagcctgggtgacagagtaagactctgtctcaaaaagaaaaagaaaaaaaaaaatatatatatatatatgtgtgtgtgtttatatatatatatatgtgtgtgtatatatacatatatatatgtgtatatatatatgtgtatatatatatatatatgtgtgtgtgtatatatatatatatatatgtgtgtgtgtgtgtatatatatatatagaaagagagagagagagagagagagagagtaagcagggaggggttgaagccagaaaagactagaaattatctaggccaaaccctttaatttatagattaggaaatagtttctggttgacttagctgagacgttctcatttgttaaaagcaagatcagaaatcagacacaattcaacgctcttcactacaccttgtttttctctttgtggaaaacaagacgtatcctgttcaaaaatttatgctgtttatctgaaagcccaaaatgcctgtttacatcatattttccattttgcaatagcagctcattttggggattattttctgatgaaatctctaggtttagttgtacttgaatatctttttatctgtacacactggaatatgcatataataattgatagaaatgtggattttaaaagtagagatgatcattattattttatgatcctttaagttaataaaattcacctagaataaaataaacaagtttaactaaagttctcgcattttcccagaaatcgtagactagaaactagtcttatttgcttattttattccaaagcttattttacctctattattttgtggttctataaaatatttctgtgtattcctccaaagaacctcttggaaaagaaagtaaacatcacatctgaaaaatagctgggcattttttcattatctctgcaaggggaggggacgtgaaaggcaaccccatatagaaactcaactccctgctttttacaatgaatgaagtttttccactgcactgtcagaatggtaattcttgctaactactcacctatttcacaacattaacagagttccaggattcatgctttaatattgcataatggtccatgttttgaacatgaggagtggcagcggagattacactttgattccttggatttcatgtggcactggatgggagcaaggcactgattttaagttgagataaaaaggagaagtcagtcaatgcctgcagccagacaggactcttgtaatagctagggagtatgcctcatttggatatgcatgactgccgggcaaggacactgccatgaatcgctaatggcagcagttgtatgacataagagagatgtgtatcagcaactcacaagttgactttgttacatgttatgaacacattcctgtgggcactcattcatagaagtgagaaatgtggacaccacagtgtcccaggcctttgttaccttatggcctgggaatatcttgctttgctggaacatgaagccacgtctggttataagaagaagtttgatctgggagcaaaattgcctgttcacgcatgtctttctcacttctttaaaactaacttgctataagggtgattaaaaaaaacagatgtcaggtgagagttttgctttgcatcaacttcctacttgtagaggtaataacataaaccttgcctggcaatcattatttgtcatccagctgagggtgtttactcttgagaaagaagtaatggacaaaattgacttggattctggttctatgtttcccattaattgactctggacatatacatgcaatttaatccatcttactaaaaacatgaccaactcacaggatgtaaattctattctatagaaagggctttccctcagtagttagtcaagggacggttcctaactcctgtctttattgagcttattttccaaaataaatgtattattttctactttgttcacagagcaaggcagcataaagaaattaagcaacaaaacaatagtgtatttttacccaactttctagaaaacacccatttttcttaagttttgatatttttttgccaacaggcagtcaaaaagaagataaataaaactgggttaagttggtaatgacacaataaataaatgagatgaagaaagaggcaataaatatgagtggataccaacaagaaacatgttcaagccctgaaaaaataatgagaaaaggtagaactattaataatacatcccgctctcgtatcacaccttgctccccagatacatcctatctgtcctggcaccatgttgatgctgttgttctgtaagctatgccaatgaacatgttggatgacctactccagctctacctcaagatttccaaataagaaaaggacccagggatctccttgctgaggtctttatccatttactcaggtcacaagtactaattaagcagctcttatgtgcaaaatgttattgcttcaggtcagtttttcctatactgctgttctataagagaggaagaaggtccctgccctcagaaagccctagaatacagatctagagatgggttcaacatctttgttatgcaattatttcattccaattgtaatgagtacttagaaaggacaaaagcagagtgctgagagagtataacagagggacttgacctggtgtagtaggcctggaaagtttcctggggaagtggtattttagacaaacaacacacacatacacccatgaatgtatacgtgtggagaatgtattctaagtaactatgatgaatgtatttcttactgtaggtcatggtcaaagtttgaaaactattgttctaactagtattataattccagggatagtagaggtcatgtgacctgtttagcacatgcctgccttaacagtatctagtaggccaggcaatgtggctcacacctgtaatcccagcactttgggaggccaaggcaggtggatcacttgaggccaggagtctgagaccagcctggccaccacggtgaaaccgtgtctctgctaaaaatacaaaaattagccaggtgtggtggtggtgcctgtagtcccatctactggggaggctgaggcaggagaattgcttgaacccgggaggcggaagttgccgtgagctgagatcatgccactgcactccggcctgggccacagagtgagactctctggaaaaaaacaaaaaacaaaaaaaaagaatgtctagtaaataagtcagtgccaagcaactacctgataactgttaccaccttagtcatcaccgaaggcagaaggtcttgcattcattggaggagagttaccaatctaagacatttgcatgaaaatgtgcacagagccctcacctgataatcaaagcatgttccaacacttctctttggataaaataagagttacatctcaatgaaatcacttgtggatcaagttctcatcctttcgtaaataaagagaggggcagcaagaaatggaagtgagcacatataagtgtgggaacctgtactttcctaacctataaagcattggatgtagtttttgctattggtgcgcatggagtcatgtggccttggagcagttaggtaccttccctgatgataggggagaaggcaaagaaattgatgatacatctctctcattgtcattccctagtatattacacttaaatctaactgccctattttgtgattgccttactgctgtggcttgaatatttgtgtctccccaaaattcatatgtggaaacctaattccatatatgatggtattaggaggtaggccccttgggaggtgattagatcatgagggcagagcccacatgaatgagattagaacccttataaaagagacccagagagctgctttgccctttttgccatgagaacacaagaaggtgctatctatgaacaagaaagcaggccttcaccaaacactgaatctgccagcgccttgatatcagacttcctagccttcagaattgtgagaaaaaaactttggttgtctataagccacccagtttatgatattttgttatagcattccaacggactaaaacattcattttccagaaaatctactccatttataagccagcattcttttttttttttttttaattttctacagatctctgcagaaacatgcagagtaataatagggccaggcacggtggctcacgcctgtaatcccagcactttgggaggccacagtgggtggatcacctgaggtcaggagttcgagaccagcctggccaacatggtggaaccccgtctctactaaaaatacaaaaaattagccgggcatggtggtgggtacctataatcctagctactcaggaggctgaggcaggagaatcacttgaactcaggaggcagaggttgcagtgagccaagatcccaccattgcactctagcctggacaagaatagtgaaactgtctccaaaaaaaaaaaaaagaagtgataatatatttgctgtatatattagttatagatagttatattgcagtactatcagaagctatgccacatattatttacgtatttcttaagatatagaaaacatccctcccctgcagtcattagtacttttgcattcaaacttcaaatgaaacaggactttagaaattataggcttggtgccatcctggccaacatggtgaaactcgtctctactaaaaatacaaaaattagctgggcgtggtggtgcacacccgtagtcccagctactcgggaggctgaggcaggagaatcacttgaacctgggaggaggaggttgcagtgagccgagatcgcgccactgcactccagcctggcgacagagcgagactccgtctcaaaaaaaaaagaaaaaaaagaaaaaaagaaaagaaaaaagaaattataggcttggtgatttctcaggcattaactcaagaaagcagcctttataccgattacctacattcacccagcacttaccccattaatttctaatgttgcttggaacaaatgaacattcctggaatgcaagctaaatgaaagagccccgaagaagaacagggcatttcctggttcctcatattgacaaatttaaaagcctgtgctataatatgggctcctgtttcctttcaagtttgtctttgaataagtggacagagtagctgaaagcagagtatttaaagctttgaaacgaccactttatttcagtctctgttcttgctgggaccactcttataaatgaggagattagaaaatcacctagaactatttaatcgttgtgcagaagaccctcttaccccaaatatttacttaccgctcattttattggcacactgcctcaaattccacctgctgtgaactgacctaagtgaatttaggtcacgtgcaactattaggttctttttgggaaataatggagaaccacagatgtgtttgaggtggatgaggaatggctacctcaagccgcagcttcatgcttcatgctgaagtcctccacaagtgcaatcatgtcgttaaccaacatttgttagaaggcaggcagaagtcagcttacagcctgttctacaatttttatgaagtgtaggattttaggcttaaattgacaccattgcaaatacagtattctcttacctttagatttggcatcaggtcacaagaattcttcctaagccaatggttggatacaaggccattggagaccagacgtaaaattaaaagcccaagcaacaggttttgctggattcttatatcctgtttatgcaatgttaggggatgtcattaaaatattttagttaatccatgtatcttgattgtcttaaattttactaatgagatcctatagggatattcattgcaatccactatttccctcagcaaaaacacatttgcgatatctattacatgcattacaaaatcctccaaggttcacagagatatatagtagtagcagtctctgggttttggcctttttcataagatgaaggctgtgctgtcctagaatatgaattcctaattaaaataaccatttgcctcaagcctctagagttgaaggttgcactaactgcacatataaaatatccaactatctatgttgagatatttaaaattaattacagatattgtaacaccattatttaacttaaattccattacaggtcctttgagtatgcaaaatatttctttgagatgtggtaacccctttaactgatcaggaaataaacctttattatcaagttgttatcccaccttgacaggcctaaagcgcagaccacatatcagaatcccctgggcagcttataaagctcctcatgcccaggctgcatctcagaccaattcaatctctgggggtgggctccaagcatcagcatttgttgaaaatccccaggattacaaagtgcggtgaagtttgcaaacccttgtaataagagaatgggaggagggatggctgtttgccaagcagaaccaggaatgaggaaggatattggtaaacaaaatttatccataattgacttttcatgaatcacagtcctactgagacccagccttgtctcatgagactttggctacgatgatgagtgagaaaaggactcctcctaatttaccagactcttgattagaagcaaatgaaattttggaaaagagacaagtcactttcaaaagaccccagcctgtacctgaccctacctctggactccatagtaatggcaggtagtggtcattcctggagtaactctgtatttcttaaaggaacatttgcataatgaacctacagcaatctggaagacgactggggtaaatagagaatttgttgattttagatggctgaatactatccgtgcagagcaattaaaaggacaactgtcagaatcaagtaagagaaaggaaataagagaagtctcatgttagtagaccttgtttgatcaatgtgttttcatcttgtatatgattaataaaataagtttgggagttaggatcaacctttgtttactcactggagaataacttgcatatagaatgaagctgggattgtccaggctggtttttttccatttggaagtttggatacaatacaaggaagcctgaattccaaactgtttctcttaaagagtgcctttctgagccgctattaaggaatgcttattgtttcgaaaatggtagcacagaagtgttataactagagtacaccttgtgcctgcaattaattacccagtgtcttcaaaaattcttgtcttttgctggtagaaaacctttgaaactatagttgtctgtggtattcactgcagcaccttagatataaagagagaaatttattttcagaggaatcttgagacagtttgtgtgtgtgtgtgcatgcctgcttacacatctattggttttccccaaggattgtagaaatcccattaaaattccagcttcttaaggagctactgaaactccagtttttcatattttcttttataatatttggatgcgtttaggtaaacttgcagcattttaattatgtctgtatcagatgagcggaagaaatgtaaaagggtttggggagagatttaattttagatagcggcgtaattaatagcatttggaaaaactagtggaactttaattaaatgtctctacattaatttagtcatttaattgaacatgtagtgggatagtccttacaatttttcacccttactctttgaggaaaaatgatttttgaataacaaagcatcagtatgactactttttattatttagctgtatgttcactacttggcactttgtttaatttttccccccatatgtttcgagctttttaaaacattaatttggcttgtcgcttttatcttaaaaactataaatctgggggccgggtgcagtggctcatgcctgtaatcccagcactttgggaggccgaggtgggtagatcatttgatgtcaggagttcaagaccagcctgaccaacatgacgaaaccctgtctctactgaatacaaaaaaaactagccgggtgtggtggtgcatgcctgtaatcccagctacttgggaggctgaggcaggagaattgctggaacccagggggctaaggttgcagtgagcagatattgcaccactgcactccagcctgggcaacagagtgaaactccatctcaaaaaataataataaaataaagaaataaagaaaactataaatctgggagaaaccgtatttggaaacattgagcaactgtttcttttcctttattttagactttaatattcactagagtcatgttgtaaagttttcaccttaatattgtaggctttttttttttttttactttgccaacttaactggcttttttaaagtggtgttatgctgcagcagtgtatctgaatttcagcagtgccttttacgtggctgctcacaatcttattaaactacatgaattatacatggagagaaatataatttggtaaatttggtgatgtttcaataaccatgcccaaggaggaatgttgtgttaaactgtcaatttgagaagtgttttgtggtgctaaccacagagtgaattcagttctacttcatttcacaaccctccataaatagtgccccctaaaagtggtgcctccttgcctgtactttgacccagatttttgtcatttttctagataagcatatacattgtgcacttattaatttttcaaatgacacaaaggtgagaatgggagtcaacacactgaaagatcaaaatcaagactcaaaataagattataacagactgggatactgtaccaaaataaaaaaattaaaataaaatttaacaagaacaagcaagatgtcctgcctttaagatttttaaagtcttttgtacaaatataggctgaggaacatctgactttgtggcgctttatatgaaaaacaaattgggattttaaataaccacaaggactgtattaatctccagtatgatctggtgtggcttactgtacgaggcaatacagtattagattgcattaatgaaattcacaaatgttccattaatctcttcactagttaaaccacatctgcagtcatattgacttatgagcatcacgtatgatgagaacactgaaaaatcataatacattgacagcagggcaaccaagattgtgaaaggtatagcgatggttatatgacaaatatttgaaagaatctagaatgttcagtaagaagataacatgaaaatacaggacagcttcttcatgcatctggggagggtgggtaaaggacacagcacacttaattaagtaagattgtagaagagaactatgggcaagtgttacagtggagcttactctgagtaaggaaaatgtaaacgttagagttgttattaagtggcatgggctgcttcacaaatttccatcattttttaatctgattcatctgctaataggacaaactgtaacaatagcttaaacaatagagaaatgtaggtctctctcatgtacaagcccagaactaggtagatcaggcctccttccgctattctgcttcactaagtccgaagtcctcctttaccttgtcctgccatggtggcctcaattctcgttgtcaccacatggtccaatatgtctgcttcagctccagccaacacatctgagttccagcccccagcaacatggaagaaggaaggaggcacagagagggcgtgtgccagcagtgttgtgagaaaatctttcagaaactgtcatgaaatgtatcccctgatagttccttcaccagaactttgtcccatgattatatttacatctatgtgaggctaagaaatatattctttccttcaggcatctacatacccaactgaaaattatgagttctattgccacaagaaaaaatggaaaatatatggggacaatcaacagtacttgcacaaagatgttttacagagaattactcttttacctgggaattttacaagataaactttaagatcctatcaactctctctctctctttttttttttttttttttttgagacaagagtctcgctctgtcacccaggctggaatgtagtggtgcgatctcggctcactgtaacctccacctcccgggttcaagtgattcttctgcctcagcctcccgagtagctgggactgcaggcgcccgccaccatgcctggctaatttttgtatttttagtagagacggggtttcaccgtgttggccaggctggtctcgaactcctgacctcaggtgactcgcccgcctcgacctccctaagtgctgggattgggattacaggcatgagccaccacgcccagccagatcatctctggaggcagggggatcacttgaggtcaggagtttgaggccagtccggccaacatgacgaaaccctgtctctactaaaagtacaaaaattagctgggtgtggtggcaggcaactgtagtcccagctactcgggaggctgaggcaggagaatagcttgaacccaggaggccaaggttacagtgagccgagatcgtgccactgcactccagcctgggtgacagtgagactctaactcaaaaaacaaacaaaaagagtctatgatcctataatttatagacaacatacaacctcctttctctacaaagagaattggttctcaagggctgtttggaaattcatttccttttaagtccaaaatgacatacaaaagtgaccaatatatacaatgtacacccttctacaataagttctcttttgttgccgtagtaatcgcatgtcttttcttaaaggaacacttttttgactcttttgtacttttgaacatagcggtgttaataataatatttataaaacattatgaaaatatgcacacaaaacacaacacaggctaagaaaacctaatggtggcctaaagtaagttctgatgtcctctgttggtggtattcttcattgccatgcttctgctgtgcctgggacctttattgctacctatgggaagttgtaagtagagaagtttctttactacagggatgtgaacaatcattgtaagtaaggaataatgaattcacataagttcacagagcatgtttttctgccctggtaatactgcatttctcactttgcatttaaagtacctacgcccttacacagaaaaagttatcggggttgggtgcagtggctcacgcctgtaatcccaacactttgggaggccgaagcagggggatcacttgaggtcaggagttcgagaccagcctgggcaacatggtgacaccctgtctctactgaaaaaaaaaaaaaaaaaaaaaaacacacacacagaaaaattagccaggtatggcggtacatgcctgtagtcccagctacttgggaggctgatgtggaagaatcgcttgaacctgagaggtggaggttgcagtgagccgagatcgcaccacttcactccagcctgagtgacagagtgagattccatctcataaatatataaatatatatatataattatcgattgattaatattattatatggtccccattactctaaactctcaaaatgtaatgtaggtcaaaatcagaaaaaggccatactgtctactccttcctctgtttcattccaactataagagaaagggagagggcaaaacaaagatgacaggaggccaaattgtacatagaattcatggaaattcttacccaacatgtaaaattatgatagtataaggaaaagtatactgcaaaaattaaacttctacattgtgaaatggagaacatttttacatctagctctattgcttctccctgtggagctgttctaagcacaaagttcccattacataatgaacaactccttaaatactgtgcaactatttctcactagaagcacgatgcagcaaactctgtttctcagtaaccatttatatcatacctagtggtaccgagttctataataaaagggtgatatgtgcatattttgtggtcatagagtgcaaagttgacatctacagtttaaagcattgcattgcatgaataaggtcaaaatttaaatacttttctatgatcatgttctttacattaaaggttaaagatgcatgccgctttaaaaatggtttaagggccggacacggtgactcacgtctataatcctggcactttgggaggctgaggtgggcagatcacccgaggtcagacgttcaagaccagcctggccaacatggcaaaaccctgtctctactaaaaaatacaaaaattagtcaggcatggtggcgggcgcctgtaatcccagctactcgggaggctgaggcaggacaatctctggaacccggaaggcagaggttgcagtgagcagagatcgtgtcactgccctccagcctgggcgatagagcaagactctatctatctcaaaaaaataaatgaataaaataaaataaaaatggtttaagaacttcaaaccatctggcaccagaaaacacctaaattgaattaaaaatctggaaatttaatttcacaacttgtcctttttcaagcctaccctaagttttgtttacttaatggggagaatctgttttatttgttcctatgtagaagactgctgattttatcatgattgtattagggcccaaggatatttaaaatatttcagtagctattacttatactttatatctgcattgcactttagagttgactgagcattttcaaagtattatcttaccaaattgccacaatagtcttgagaggctagtaaatcatgggagaagcccccatttccccactggaaagcagagaaaacccccattgtagtaaaggaggggttccctccagagctcttgtggttgtgttgaggaggaagtattaatgctgctgggcatgacttacaagaaataagtcaattcacttaagcaaaagtgctatgatcctgtataccatgtgagcagctctaggatggggtcacccagcattttggagcagacattagaacatctggagggagtaaacgcaaagaaaatgggctagatacctttccttggatgggaaaggataacattaagataccaagatcaaatgttcaaagagcacatatacaccagagaatactatgcagccataaaaaatgatgaattcatgtcctttgtagggacatggatgaagctggaaaccatcattctcagcaaactatcacaaggaccaaaaaccaaacaccccatgttctcactcataggtgggaattgaacaatgagaacacatggacaaaggaaggggaacatcacacaccggggaatgttttggggttgggggagtggggagggatagcattaggagatatacgtaacgctaaatgatgagttaatgggtgcagcacaccagcatggcacatgtatacatatgtaacaaacctgcacgttgtgcacatgtaccctaaaactttaagtataataataataaaattttttgtaaaagcattgtataataaaagtagtaagataaaccagtaaaaacaaaacaaaacaaaacaaaacaaaaaaaagttcaaagaggccgggtgcagtggctcacgcctgtaatcccagcactttgggaggccgaggcaggcggatcacttgaagtcaggacttcgagaccagcctggccaacacggtgaaacctcgtttccactaaaaatacaaaaattagctggatatgatggtgcgtacctgtaatcccagctacactgaggcatgagaatcacttaaacctgggaggcagaggttgcagtgagctgagattgcaccactgcactctaatgtgggcaacaaagcaagactctgtctcaaattaaaaaaaaaaaaagtttaaagaaaaataagttatttctccatgcttcaggagatatgtttcgcaggagaaagaggcttaatagagaaaacagatccctacaaacatttgtggtttttaaaactgccccattggttactaagtggataacatgagcgtgatgccagattcagtactctagtgagccatgcagctttgctgtgctctgcacctgatgagtgtggcctcacttcttataaatgcctgtcattgctaacaggggtccttgctgaaacaacagggctggactaatgctctagttcccttcctggaaaacctatcccaaagctgagatcctcatgatgccttctctcatatatgaatgattgcaggttacgctatcatcattaaatcgaaacattttagaccactttgcgtttgtttgtttgtttgtctcattatgtccagttttatcctgtttcataatttaataaatttttattgggtctgtcttctggttaaatgttgtgtgtataaaaaataaagtcaagagagagaacaggagttatggaactaatgacaaatccatccttcagctaaataaaattatactatggatgatttgagctgtacgttgagtgataatttttaaaaataagatagatcgggtgcggtggctcatgcctaaaatcccagcactttgagaggccgaggcggatggatcacgaggtcaggagttcgagaccatcctggctaacatggtgaaaccccatctctacttaaaaaaaaaaaaatacaaaaaattagccaggcgtggtggtgggtgcctgtagtcccagctactcgggaggctgaggcaggagaatggcgtgaacccgggaggtgaagctcgcagtgagccaagattgcaccactgcactccagcctgggcaacagagccagactctgtctcaaaaaaaaaaagaaaaaaaaaaagggccaagcatgctggctcacacctgtaatcccagcactttgagaggccgaggtgggtggatcacctgaggtcaggaattcgagaccagcctggccaacatagtgaaaccctgtctctactaaaaatacaaaaaattagctggacgtggtgacaggcacctgtaatcacagctactacggaggctgaggcaggagaattgcttgaacccaggaggcagaggttgcagtgagccgagattgtgccattgcactccagcctgggcaacaagaacgaaactctgtctcaaataaaatgaaataaaataataataaaaaataagataaagtatcacaagtaagatgtagttgaaacttcatgcatttttctatgatgcctatgatattcaaaagataactgaatttcatgagcagagttcaagaacttctgagtatacttttcattgatgacttaatgtaatggatttctatgatgatggcactatattcttttggtgtttatggtattaataaaaaattgtggtaaagcttgtggaaatgaacatgccttggattagggtgccttaaatgtgcctttgtaaatgcagctaggagactccaagtcacccttctagtctaactgctactcctttcttttacaaactacatgccaactaaactgaccttgatctgtttatgaaaaggcggtataggaacaggggctctgcaattggacagatccaattctaatcaatccactccattgatagatatataaccttgagtccttcctgtgcctcagtttcctcatctgtaaaatggaattaaaaaccaacttcgtgaggcttttggagaatgaaaatgacataactcaaagattattgggtatcagaaacaataatgttatctatcactgtctttactgttattattattattgtcattattattattttctctacctggaacaccaattccacaaactcttaatgtcaagaccatgctgtatcatggagccttccctgattcctccatatgaaaataattaattctcatattaataatattacttttctagttgtattttctttttttagcttttattttaggtttgacggtacatgtgaaggtttgttacataggtaaacacatgtcatggaggtttgttgtacacattattttatcacccagatattaagcccagtactcaatagttatcttttctgcctactcgtattttcattatccccaagtatactatacatatcttaaaattaggatccatgttgaaaaaacattgatatttcctatggcttctaacacagtacattgcacttagatattcagcaactctgtattgaatgtatgggtacaatctgctcttagtttctaatttggtattaatatgttcaagcctcaagagctcatgtaaatgatggtttgactatattgcccatcttttgttaagttgaaaagctgaaattcatgcactgtttgttagtgtagtaatttgtgacaacgtctagctattaagtcttttctaggtataaaacctttatatctgtcattgttcccctcttgtgtttttgctttaatatcgttgaaagcatctattattggaactttcacttctgaatagtacttttgagaacctgtatagaatttcagaggccttagaaaattgtcatagattgcttttagtatatggtttaccactgtggtctcttaacttttcaaaaagtatttccaaagggcacttacatccataagtggaaattgatttacatctattattgctgattgttcactattctgaacttcggctaaacaggtgatttaggcagaatttttttaaatattagattttttcctactttctaaatattttgtagctctttcttattaatttgagtcaacttatgctcgcttttttttgtcaattatagatggttgtcaggggtttggcaaatgtcatatgaaggtaattctttaaaagttgggatttttgaactgtttatttctactacttttgattttgctggaaattatcattctattaaagggacaaaagggtgctcagaaatatgcattgaaaaatttcttacagatttatcaaccattgccctcaggcactgatattcagccagtatgttccaatacatccatgtctttccattttaaaccttttaattctgttctaatttttcattgcctgtgcctgattgttctgtatccatctgatacgaatggttaagtacaacattttaaatatcactcttgcctatacatattatttttcttgtcagatgatataattgtagtcattacatgtttcttaagcacaactgaaatcttaatttaaatcaataagtcttgtttctgtggccattgtttcccagaactctccggatttctaagcatggtggttattcttccaggaatagtgccgagagtcttcagcagcatgcatttctctctaattgacattatttcacactctccattttccttactattgaaaactgtatttcattggtattttgccaaggatcctgctctgtttcataataatgttctgttcgcactctctgcactgacaaatacctattccatgcatcaattgcataaatggcaatttgaaagcatttaaccacagctggatatttttcattgattcttttcatctgaagatcattcattaggcttctccctcctgtttcttctcacatccatacctcctttcctcctatgtacatagtgtcttttgcattttctgtatttaagtgtaaattgctgactacagttatgcttttacctcattccatggtcataatgaaatcacaaatttaaaaatgtactactttttaaacctgttttctgacttgtccatctaaatgcaattttataattcttcgacattcagcctcctggtgaatgatttctgcaatctctccaagacatctgtgcagtgttatggattatattgattgcattttgtccatgttcaaatttgcagaatgtaacctacagaatatatattgactaataaagaaatgcatccacatggtggatggttgtaaagagaaaatatatattggtgtgcagcaggcgcccacacaaatgaaatctagaaaacagcagcttgccatgtcagagttgcaaatgaaggctgtggctacaaaacacagaaagtctggagtgtatgaaaggtttttcttccaaattcattcacacataaaaatgaaaaaattgaaaaatcatatatgtgcaccttaatttttatatcgcattggtgtttgggcatacgaccctgagattttcataccctcgatttttttaatataaccacctgagcgtttcttcccatggggttactttagaagatggggggtgtacacactacgtatgtatgtcaataaagaaatgaaggaataaaggaggaaagaagtgaagaaggctgggggtaggaagggagggagaaattcagtgattcattacttattcatcatcctaaactggcatataaaataatatgtttaaatcagtctaaaattttcattgtataatctctgaaataactagtccccactccctaaactgtttggtgtaaatatttatctatgtctaatcatttctatgcaaaatagccttatatatattttcattttcataagatcatctaagaatcaaaggaaaagctattttaggcaatgaacataggcagtgatttcaaaatagaatttgagaaatgcaaggatagatggaatcacaaaagatgatctcattcatggtgttttaaaccctacaaatagatttctgtttagttgacctcatttcaatagcttctcatttttttcagaagtgtatttgatgtgtatatttctaataaacttatttttctttttgtacccagtattaaggagcacagcatttatatccactgaacaaaggataactgaaaggaaactccttgatatccaacttggagtatttgtttctcgaatgaatatgagtttatataagtagtttttttcacatacataaaattagaatttgtttgtattattgatattatttcagaacagcggatttaacgtcatagatgatctagatgtgtcctttccttagaaatctttaaaatgaatcacatagtctagaaacagatccagatactacatgctctcatcagaaaggactttcttctcttcgtgtcaagttcagtgttggcaccgtatagacaaagcgtgttaaaatagcagggttcttgttctctgacacattacaagagaggcaagattataaaactgctatgtgtctcattataattcccattagtttcatttgcttcaaaacattcacttctgtgctttttgcaaaagctttcaaacttattttttgatgattctaaaagtaattcttctatgtcttttcctagtgatactagcattagttttcttttccaattgtactaggaggcatgagagattatcgatgccctattttcttgtctaaataggcaacccaaataatcatagtgacctgttcatttatattatctttatttcttgcctcatacttcttcatatttcttcatttcccatgtttccttattctttggagccagaaacgatcacgttaatcactctttccattagttttctcctatacattttctgatctttctctgagccagttaagagtcattcagccatttgataatggacactagtttactttgaccttgcaaacacaaataccctgtttgatctttatttgctgagagcagtaagacagaagaattacaataaactttttagcacccttctgttcaattctttttcagaaatcgttccctcaaaaagcctattctaggctctttcttttggcagtttcctagaattttcctttgcttttcaccaactggaacattatcactagaagtaaactaagggaccatctaattcaacaccctcgttttgtactttaggatactgaagccaagagaagctaatttttttgcctgccataacacaactagttagtgaagcagccaaaactataagggatcttgccaccataagctttatcggcccatccgtttatctcctcaaagcagccctatacctgatttccttatttctgttctctaagtaagccaagctcagaccttagagtgaccttcccctaatccaccctgcctgacatccaataaactgacaaatccagttgattatgaagctacagtgtttttcaaaccataccataattgtctaggctgttgccatgctctacacaccagttttcttattccagtccctccctgccccagtcccagttcactctactcagcctctctactgcaatggataaaatcacagtttccagattcacaaagctcacagctctgccactttctagccttgtatttgtgtttcagttgctgctgaaactctctaagcctattttccatctataaaatggaaaccaacccagaggctcgttgtattacagagatattgcatgaaaagcatttagcgcagtgtctggcccataagaagtcctcagtaaatagtagtcttggggaagcagtagggtgttgtagtaagagagcagagcaggggacagcaaactacaggtctcagtacaaattcaacatggggcctgggttttttttaatagcaggggagctaaaaacagtttacttgttttaataagttgtacgaaacccaaagaagaatatgtaacggagatttatgtgttcctcaaagccagaaatatttactttctggccctttacagagaactttcattaattcctgttgacagctgtcagggtatgaatcctctctaccacttagaaactgtgtaaccttgggcaaatgttttaacctctccaaggtttggtttccctgactgtgaatagtacctatgttacagggttgttatgagaattaaatgagatcatttatatcaggtgcttagctcactagctgaaataggatttaataaatgttagctgacatggttacgtctactcattgttgcagataaatagcctctaagtgcagctttaatagtgattgtttcttaaaatttttgaacaaagtttttctatttcttatccaattaaataaatattccacattctggcattcaatatttctaacgacatcaagcaactctaaaatcattgaatgttttaaagcaacaggaaaccttagaaataactcatctaaactcatatcatagatatggaaactaagggccaataaaaccaaggcttctaggacctgaaatcagatcctctctttttaggtagtgtgatcttcatcgtgcttctgccatgcaatctcagaatttaaagggatttaagaatcattcattttcttcctaaggcaggattcgaccctataaaatccctgtcagtttggtcattcaaacccagtttgagtacagtcattgatgataaatcacccttttcccagggagcagttctggttgtttcaaagtctttataataaatgaaaattggctttcctgaaatctctatatattgatctattcctgcccactggagccaaagagaaacgtcacttctctacatctgtaaaatactcgttgtcaattttcgtatcttctctaagcatcctcgtttcaagctgatgtgaactagttgggtttttgattgttttcattgtcctgctaagtcgaaaagctaagaaaagcttggctctttcatcactgttatatatcccactgtgtaacagaacttgagttcagggtatacactctaaataactgcttttgtaaaagtattcaattatattgatttttttcgttccctctgttgttcctcataattaccctcagtcaagactttcatcttcgtctttatcttcctctgcaagaattaacagtggtcccttttgtgaacttcaaatatctgagactggtctcagttaatttaggaagtttattttgccaaggttgagaatatgcacccatgaaacagcctcaggaggttctaacgacatgtgcccaaggtgtttggggcacagcttggttttatatatatttagggagacatgagacatcaaccaatatatgtaagatgtacatttgttccatccagaagggtgggacaacttgaagcaaggaggggcttccaggtcacaggtaggtgagagataaatggttgcattcttttgagtatctgattcgcctttccaaaggaggcaatcagataagcatctatctcagtgagcagagggatgactttgaatagaatgggagacaggtttgccctaagcagttcccagcttgacttttccctttagtttggtgattttgaggccccaagatttattttcctttcacactttcaatataagctatccagaactgatgataatattccagatatggcccaaccaatggaaatgattgtgtttcctacataccatatcacaatcaaacctgttttgcaccttgcatttactttctttattaatgatgtcattgcaatttagaaaatttggggccacatttacttcttcctctctattatcttcagtttttatttggtcactaaattctgtttgctgactcttatatctaaaaataaaaacactcaaatccagctattcctctctaactactctgcccttccctcagtcctttctcagtgactattaatgatttggccttctaatgattagcctccctgtccccagacttttatccatctttatcactatggctagttatcttgctaaacaacagatctaatcctagtaccccattatattaaaaaaatcttctatagctacagctttctctccctccaggtcagtatccatagcctgtcaagatgtggctttgataaaggacagaaggcagggaaattctgggcagaagagggcaggtccccattgaggacccaccctcaagccaaaaagcctggaaccatggcccaaagtgagaacttacatccctgttttccctcttgaagggtgccttttccaaaaccatccattaccccccacccaccccccaacctgtgcctataaaaaccccagagctcagctggcagaaggaggagaagcagatggatgtcagaaactacagttggacatcaaagagaagcggcttgactttagagggacagtttgacagcatagctttggagaggagtccagctgtggatggtcagactccaggggaagattaccttcccactccatccccttttcagctccccttcccactgagagccactttcattggcaataaaatcccccatatttaccatcttcaatttgttcatgtgacctcattcctcctggatgctggacaagaacttgggtgccatgcgtgtgggtgaaaaaggctgtcacactgaccctccactgagctgttaacacttaagccatctgtgaatggcaaagctaaaagggcgctgtaacacttcctcatgggcaccctcccctagaggctgctgcagggcccgtacggtgttcactcttgccagcactcaaaaatgctggccccagctgctgcacctgctcacctgtgctcccccttccatgaggggtggaccagcgagtgagtggagtttgctcccctccagttcccacccacgaagggatcagggaaatatcctccttcagctccagtgaggcacagtggtatacacctatagtcccaactactgaagaggctgaggtgggaggatctcttgaacccagaagtttgaggctgtaggcactgtggttgtacctgtgaatagccactgccctccagccttggcaacatagcaagatctcatctctaaaaaagaaaaaatatatatgatgtggctccaattcactgatctagcctcttaactgaattccttcctcctggctgggcacagtggcttatgcctgtaatcctagcactttgagaggccaagacaggagaattgcttgagcccaggagttcaagaccagcctgggaaacatagtgagacttcatatctacaacacattttttcaaaaagaattttttcctccctgctccccaccctacccccttgcaaccttatttactcttcggcctctggccctctcgctatgtctttctcagcttcatgcctttgaaaatactctttctatgcctggaaagcccttataaacctggaaattcctattcttattcaactctgagccagtccattttagtggcttagttcagaggctctagatttaaattgcaattctgtcagattctgtctgctttgccaacctcaatcaagttatgtactatgcctcagtttcctcatcagtagaatgaaaataatacagtagtgcttttttcatagggttgtagtgaggattaaatgagatgaagcgtataatcctcatgtacataacacagtacatactatatgtgttgcacatagtaagtgctcagttctttttctttgcattattcttagcacataagtcaagttacatttgctctcccttacgcaaggtcaattgttcttttttatgtgtttacccgttactttgttcatgcatttgttataaccactgccatcataaagcaacttgctatctttgttcataaaacaaatcccagattcactgagctcaaagtgagagaaggaaactttgcattatgtgcagttcctatgcttttctccaaatttcacatctccgttggggatctctcactagttatccttgccatacccccacaccagccttacaattttgcattatgtttcctacatcatgattctaaacggtcctcctgttcgctttctctccatcccatatcgttgcagatagctatttcctctttttaagacagaaacacatttgcattttgcctaagctacatttgtaaattttacagtattttcgaaagacacaatggaatctaggaaagatgcaacagataaagagattaactggccaatttttgagagcaccatccgtaaagtccacgaacaagtgaggcttccttgtcggagaaagcaattcagtcaccataaatgatcattcaagcctgatctcattccctcttgaaactggaaattgaaagcttgttcctctgacagttgtgttgtcagtggatatgcccagtgtgcaaaggactggacaaagggcaaaagtacacatatcccatctggaattctgagtcatccctgagacatcattttggatttgtctactgagatgaaattaaaacatgagtaatcaagcccacacttcttccccctcaaactcatctctttggtatcatcaagaaaatcaaatgctaatagccattgacctcctaattctagtgctcttagctatgataaaacagtcattaacttaatctaaatgttgcaaataaaggagccccatcaaagctgaagccccaaaattatacaaatgagttaactgggaaggcatgggggaaacaacagttttcataagacacactctaaatctagtttattctcttaggaagacttttctcatcaatagagagccacataaagatgccttacctgcctttcacggggactatatcaattggctgtactgtcactcactccaaaactctcaaaatgcctaacacagattcttgattttattgattgcattagatgttacgttttctaaattttcagcaccctggaggtcacctcaggaaatcatgcagtttttgaatgattttccttagaaatacacgtgtagctatacatatgcccatgcgttatttaatcagttagtgaaaggaggaaaacagcatttctattattgacctttctcaatctctgaggagactgtatgtcttgcctacagtccaggattgaaagcaaaagaaaaaggcactgacaaaatagcattttattttaatagcacattatggagagacaaaaaaaaaaaaaaaaaaaaaaaaaccctgggatttcctttgtctaagtagaattgacgtatgggtgagatcagtctctattttactcagtacaagtgcacacatatttatgtacacacatataattgtcatctttgggccgggcgcggtggctcacgcctgtaatcccagcactttgggaggccgaggcgggcggatcacgaggtcaggagatggagaccatcctggctaacacggtgaaaccccgtctctactaaaaatacaaaaaattagccgggcgtggttgcgggcgcctgtagtcccagctactcaggaggctgaggcaggagaatggcgtgaacccgggaggcggagcttgcagtgagccgagatcgcgccactgcactccagcctgggccacagagcgagactccgtctcaaaaaaaaaaaaaaaaaattgtcatctttggaagctaagggccctgtatcagagtatcagaatatacctatatccaggatgcaatgttctccagttttgcattaacatcagctacaaggttcactgccatctaagactaatcaacagtaatagctaaaggacaaaggtcagttcctgagagatatgcctaaattcatctggctatatcttctgttcctcccaaaccctaaccccataaattcttcattgtttagaaggattcatattttttgtttgtttttcatattcccattttattggctggggttagaattgcaatggcagcaaaaaacacagaagctatctacagtggcttaaataaatagagttttatttatctccaatattaagatgtctggaaataaggtgctttgggcccaacagtatcaggactggcatctgtatattttttattgacttttcctcatgcaatatagcagccaccattatttcacagggtgaaaaagagaaggcaaaaagggtgtactatctgagtcttatcatttttataaagccaaaaatttcccagaaaccttttttgaaagacttctacttgtatatcattgtgtagaactgtgtcacatgacagccaccaacaaaaagatggctagggagaagtggttttcaacaggtattgaagtagctaaccggcagtgtctgccggtcttcagttataaacaccagcagctaactctggctaattcaagtcagggaaaacaaaggggatggggtaggggctctttatttaaaagatactcatagaaatgaacgaagtaatttgaaaactaggtctcagaataggacatgaagtataagagttctaaaatctcaaaagcaggaacacatgcatcttctttttaagtgttgtctttgaaatactaagctccaaagtctttccaaccttgtattattttcttcctttgtcagcttcctgagtggcagagtctgagtaacctatggggtctttgaactctttaggggaattgaggaaggcaaaaaggtaccatgattggcagctctactagagtcacaagaaatatggggaaagcgattcctcaaaggaaaaacaaaaacagaaacaacaaccaggcagttagtagaaggatgaaatactggacccacaaagacaacatatgtcttctcaccacacttggtctctctctctctctctctctctcacccttctctctctctcatagtaatgaaactaaagctgcaaaactaaggcctagctattcattgtgatccttatgagatcataaaaaaaatctgtatttaagtggagaaaaataaatggaatatcaactttaaaaaattttttttgagacagagtctcgctccgtggcccagactggagtccaatggcatgatctcagctcactgcaacctctggctcccgggttcaagcaattctcctgcctcagcctcctgagtagctgggactacaggcacgtgccaccacacccagctaatttttgtattttcagtagagacagagtttcaccatgttggccaggctgttccgaaactcctgacctcaggtgatccacccacctcgacctcccaaagtgctgggattacaggcacgagccactgcacccagctggaatatcgatttaattgtaagagaaaaatgcactagtttaaaaatgtgtcctctttatcctcaggttttaaaaatatttttaaggtagtttagaaaaactgaagtgattatttgataaataaatttcaaatgctatcaatggaacaagaatggatattagatatcctgctaacaaggatcatatttttacaagttgtttctccaaagagaacagagctacagctgagattctggtgcgcataaacctttccatcagagctgtagtcacctaacaattcttatatcacaatcttcatatctcaatcccttttccaaataacttcatctttcttaagttgcatacaaatgttataatctaatatttttgagatggatatcatgtgtcataaaaagaaagccattgtaatattaccaataccaagtattagcaaatattgacatagctttagaataaaaataaacagagctcaggttctggctctgccatagctagctagatttatcttaagacttcagtttcctcatatacaaaatgttgatagtatcatcatcttgtaagccttgttgtaaagagcaatttagctaacagtaacagtgtttaacatgcataaagtgaagactcctttctgggctgataagaacgctagtttattcatttgcttatttctatatttttaagcttagagtctgaaaattttcagagtctgggagtcaacgtgtggggtgtgaattggaacttcaccacttactaacaactcccttttgtagtgcttccatttatttatctgttcaataggagtaataatagcactcgctcaaagagttgtctgaggattagatgagacaatgcttgcaaaatgcaaagtggagcacctggtgtatagttggtattcaataatttctagttgttgatatgatgatgacgatgatgatgtattctcttgatatgtgaatgctcatcacaccatcctatggaatatttgattttaagaaaaagttgggtttgttttttttttttgtttttttttttttttgagatggagtctcactctgtcgcccaggccagagtgcagtggcgcaatctcggctcactgcaacctctgtctcctgggtttaagcaattcccctgcctcagcctccagagtagctgggactacaggcgtccgccaccatgcccggctaatttttgtatttttagtggagaccgggtttcaccatatttggccaggctggtctcgaactcctgatcttgtgatccacctgcctcggcctcccaaagtgctgggatgacaggcatgagccaccatgcccagccaagaaaaaatattttaaacaagttaagatcatttactatactgtgccctaagatgaggtgaacatgtagatcatgagatctaattgattttagatgcagttcagttttttaaaagaatgacctgctttccatattaaaatttcaaaacaatgatatgtggagatgatgacagaatatggctgaatgaggtaccttgttatcctcaaccttttggctcagagacctcttccttgctggaaactttcctaaccttttaatgatttattaacattttgcatgcactctttatacctttcattaatgactagttcactgcaaatttttctttgctttatttcctattcttggtgtgacattcattctctatctgtttctatggaagcttttgtgatgcctcagagagaaagaattctgagtctttgaaataatgaaaacattactaaaccataaaacctagatttcaggagcctaatagaggattagagctttattacgtacagccatcttacagtttagccttcaagtctcaattgtggaatgatcttttgtcctttctctccagtgtgcatgtgtgcatacacatatagacacagttcgcgcttcagtcatataaatgggaagccacaaagcttcctagagtacccagatgcagaattagaagacccaatcttgacaccagggtcaggggatctgtggtttggggggacttgtgctggctatattgttgtcacagcaggaacagtttgtgtcggtatagaggctttaacttctagtaaagggatatataatgaaaatgtaagcaaccatcgtttatttttctcacataataggaatttaagagaaagatatacccaaaattggtttattagctcaacagtttcattcagaatccaatgtctttccatctttgcatttgctatccttagcctttggctttggtctttggaattgtcacgcgatggttataaaatggctgccacactccaggaattgcatcatgacagtgtgaatggaaaataaaggaagagtggcagttcttgtcatgtttcagaagcaacagcatgtctccctaacatctctttggccagaactaggtcaagtagctgcatctacctgcaagggaaactaagaaattgactatcagtgctttttaaacttttttttgtgtgtgtggaaatagataatcactagagaaaaaagggagagtggaatggttgttgatgaggcaaccaacagtgtctaccactctatttataaaccttttcttgatttttcctactaaatgtgtggccgttttttttgcttgctttttgttttttgtttttgagatggagcctcactctctcccccaggctggagtgcagtggcgtgatctcggctcactgcaacctccgcctcccaggttcaagcaattctcctgcctcagcctcctgagtagctgggattacaggtgtgtgccaccacgcccagctaatttttgtatttttaggagacatggggtttcaccatgttgatcatgctggtctcgaactccagacctcgtgatccgcccatctcagcctcccaaagtgctgggattacaggtgtgagtcaccgcacccagccaatgtgtagccttttagttcaaggacctttcattataaatcttcatagtccaaacacccggcatattgtctggcacaaaataggaagaaatatttttggacgtgccaaggaatttgcaagacagtgagacaaatagccagtaaaaatgttagcattaatatattattaaaaatagtgagaaatgctccaggcgcagtggctcatgcctgtaatcccagcactttgggaccccgaggcgggcggatcacttgaggtcaggagttcaagaccagcctgaccaacatggtgaaaccctgtctgtacttccagctacttaagaggctgaggccggagaattgctggaacccaagaggcggaggttgcagtgagccgagatcacgtcactgtgctccagcctgggtgatagggcaagactctgtctcaaaaaaataaaaataaaataaaaagaaaaatagtgagaaatgttatgaagacaaagaataggctactttggaagaataatagtgggaacttcttcatagtctaggaaggcctctctgaaaaggatatatttaagctaaaatctgaaggttaggtcagtcatatgaacagggaggggaatggaataatattttcaagacaatgacctaaaaggaggcaagtatggctaggagctaatgactgagggggtgagtggtacaggacaaggctggagagtttattttatgggtaagcagagaaataatataatctgacgtacctgtgaaagtacacctgagctgatgtacctgcaaaacatcatacaatctgatggacctgctgtataaatgagagattgaatgtggcaagagtagaagcaaagaggccaggtaagaggcatttgcagttgtcttgatgaaagaaaatgactactgggagtaagatggcggcaatggaaatagagagaaatgaacagatttgagatgtattttcgagacaaaatctgtatgacttggtgatggattagatgtcaggcatgagggattgaggatgactcccaagttttttttgtttgatcaacttgttgtactgtttgctgaggtgataaagatggaggaggaagcagatttggaaaagatcaacagttcagttttagacatgttcagtttgaaatgtgtgtgatatgtccaagtgcagaagtcaaattcaattatagctcaaaggagagacccgagctagaagcgtaaatgagaaaaatattgatacaaaatggaatttagagcatccagaatggaaatcacttagcatgtaaagagggaagggaagatggcctaggaccaaaccttgataaacttcaagaaaaagaagtcaagcagaggtaggagaagagaagtcagtcaaaaatcaaaagaatatgacatctcagaattcaaggatgtgaataaatgtgtaagtgatggatggctttcggtctgggctttttgttttttttttccattttaagttccaactttgctacaatccggctacgaatcccacaccctcccaaattatctgaggatgttaattgatacttgatcagaaagcagtgatttttaaaatcatatacttctaaattatctgagatatgaagcaatgagatagggaagtggctgaaatatgtttctctggctcagctgtcatgagggcttgctctagaatggcactcaagcacatgtttatccactgagctctatatcatttattccattagctgaagaaggaatctctcacactctaacttcagttctgttggacatgggaataaaagttagatgtatacagactaaactaaacagatggtagaaaaacaaaggattcttaaagtatattggagaaatgcatttctatggtcaattttcttgaatatcctaagatcaggtttcatgtatataattctttacatttcacaaagcacctttagatgtgtctattccatttaaccctcatcctaactgtgtgaagtagggcacagaagtgtagaaatgattttttaaaactcactaagctaatcaatggataatctgtgattataatagaatctgagtttcggcatctttatcttattccttactgcactatatctggaatggtaaatattgttcatctcacaagcaagctcttattgactgatatcagctgcctagagtggtttattgtaaaagagcataaagcaaattggggaagactacaatacagtgccataggctgattagtaatttctaccattggtattaaatgagaaaataatggtacaagtgctttacatttgtctgccattcctaaactaaggcacctcctgttatttataaggaagaatattctgagaagtttaaaagtctcttgttaaatcatttgatgacgttggataaaatggcttaaaataagaatatgcctgttgcacaaataatctacactcccccaagataatgaataagtcagctggagcatctcaagtttcaatatgtagaggatcaaaatgaaatagtcataaaaccccttgcagacatttcttgggcaggcaaactaatttcctagtaaaagaagttggaagttggacaaattgtatatgggaactttctatactacttttgcaaattttctgtaagtttaacttttcctaataggatgctgagattcagctcttccaatggtctcaaatgttttttggttttgttttgttttgttttttgagacggagtctcactctgtcacccaggctggagtgcagtggcgtgatcttggctcactgcaacctccacctcacgggttcaagcaattctcctgcctcagcctcccaagcagctgggattacaagtgcctgccaccatgcctggctaatttttgtatttttagtagagacgggattttgccatgttggtcaggctggtctcaaactcctgacctcaggtgatccgcccaccttggcctcctaaagtgctgggattacaggcatgagccaccgctcctggcctcatttaaccattttgactttcactttttctgtcttcaaaatgaggtattgagctaggtaaacttaatgtcttttttcgctttaattatctaataattctgtgattctcaacttggtgtgttaaaccagattacacctaagaaaccctgaagactttttagctaggagtttaaatattcacttagtcattcaattaatatctattgtgggtctgttatatgccaggcgccattttaggtattgataataaagcagcaaacaagacaaaacccctgccctcaggagagcttacattcttgtaaagaagacagatgataggccgggcgtggtggctcactcctgtaatctcagcactttgggaggccaaggcgggtggatcacgaggtcaggagatcgagaccgtcctggctaacatggtgaaactccgtctctactaaaaatacaaaaaaaaaattagccgggcttggtggtgggcacctgtagtcccagctactcgggaggctgaggcaggagaatggcatgaacctgggagctggagattgcagtgagccgagatcgtgccactgcactccagcctgggtgactgagcaagattccatctcaaaaaaaaaaaaaaccgaaaaacaaagaagaaagatgataaacaagtacacaattatcatataacaattttaaatagtgacagcatgttgaaataaataaagcaaggaagacgctagagagttgttcatggaaggaattgtcattttatataaggtgatcagggaaggttccactgaggaggtgacatttgaggaaagacctgaaagaagtggggagggagacccgaaagttcatgaggaattgtgtcccaaacagggcaacacataaaaagtccttgaggcaagactaagctgattatataacatttaaaagaattaggccaggtgtggtggctcacacctgtaatcccagcacttttggaggccaaggcgggtggatcacctgaggtcaggagttcaagaccagcctggccaacatggcaaaaccgcgtctctactaaaaatacaaaacttagccaggcatagtggtgcatgcccatagtcccggctacttgggaggctgaggcaggagagtcacatgaacccaggaggcagaggatgcagtgagccaagattgcaccactgtactccagcctgggtgacagagcgagactctgtctcaaacaaaaaaaaaaagaattaatttacatatcatgagatcatctagtctaacacccttactagacaagttcaaaaaggttaagacttggccaagatgacacagctatttaatgtgatatctgggttagaattcacctcatctgaattcctctcaaattgtgctctttgaggtcaatgtgccttttaaaaaatgacagaaagcatggctgtagatttcagatcataccaaatttgatggaacaatgaccatttttagcttcctatagagtctaagacttgaacttgccaagggagtcacagctggatttgtaagcatcaaatccacaaatgtacttaatgtcaaccaaggattttgtgtcacctgtaatgctcccccaggaagcccccaagtccactagtcctaatcactgtgtttggcttcataacctgttggcccaaacattacgcaaaaaagagcaatattcccaaggtggtcatgttagttgtggtgagatgtcaaccataagtagatctgaccgaggaaatgccttaaggaagcagctcaggaacacctgagtatatgtgtctagaatgaagcctattaaaaaaactactgcagagctaaagacagctgaaagccattatgacagtcacaactacttgatagattgaaaccaaagagttcctttgtgattagatagatcaggactctaaatcatgtttttacttcatgtgttcattcattcatcatacagtcagtgattcagtaaacaatattgagcatccattatgtgccaagcactgtgttaaattctggaaacacagagatggattagacccctgtccccagggagcataaagactagcagagttagacctccctcccatatgaagaaattaaatgaggtaaggcattaaaagtgctatgattacataatacagaacccaaaggggaaggcattttctgaaaaacagaaaactgaaaataccagcttttcagcctcacacagacataggaaaaccaacccccatcaacatcatctcttcttttttttttattattactatagtttaagttctagggtacatgtgcacaacgtgcaggtttgttacatatgtatacatgtgccatgttggtgtgctgcacccattaactcgtcatttacattaggtatatctcctaatgctatccctcctccctcccctcaccccaaaacagtccctggtgtgtgatgttctccttcctgtgtccatgtgttctcattgttcaattcccacttatgagtgagaacatgcaatgtttggttttctgtccttgtgatagtttgctgagaatgatggtttccagcttcatccatgtccctacaaaggatatgaattcatccttttttatggctgcatagtattccatggtgtatatgtgccacattttcttaatccagtctatcattgatggacatttgggttggttccaaatctttgctattgtgaacagtgccgcaataaacatacgtgtgcatgtgtcttcatagcagcatgatttataatcctttgggtatatacccagtaatgggatggctgggtcaaatggtatttctagttctagatccttgaggaattgccacactgtcttccacaatggttgaactagtttacagtcccaccaacagtgtaaaagtgctatttctccacatcctctctggcatctgttgtttcctgacttttgaatgatagccattctaactggtgtgagatggtacctcattgtggttttgatttgcatttctctgaacatcatctcttaatataaaaagcataatgtgctgatttcacattgcatgcctgtatcaaaacatctcatatgctctataaatatatacgcttaatgtgtacctacaaaaattataagaattttttttaaagcaacaataaatatcttcattagtcaaccaaattaaatctattaatatatccatgtttgtgaacaggatggccacagaaccctgtggatgcttaccacttaaacatttcctgaaacaaatatgtttccaaaacatcttgcctgtctaatctgacaactgcagacatcctaactaggctctgaaggtgctctccatagcactgatgttattgattcagttgttaacagcgcaggcataaatgactgatgataactctctaaacgtcccttcctactgccgttgaaatggctctgggctttatccaagcagggctgctaaatgaatagtagatgtaccagcagaggagaaattggtcctgaggtgaattaactctcctgaggtagatttgtttgtgcttccaacaacctgtacgttaaaccttgtgaaccttcatgtaggaattttgaggagaaatgggcaatttttggaaagcctaatgttttatcagccgctttttcttctcattgagacctgtgtattctcaagggactttggaagtttgccattttaagaacagacttgatgagaattatttgaagtcctccacgtttccatttatcagttttcctaatacagacatcctacgcacatcgttgaaagaatgttctttttgcctcacaggtagatcacaaaagtgggcccataatcattgggtagagggtttctcagctctgagttaaattgcagctgggtattgtttttctgtaataggatcttctctgagtgaatggtgaaacatgcccatttttgaggtcatgagagcagagctttccacatcatggacagaaaagggcaaccggccatggtttcagttatacagggagaggaaacaataggttttgtctctgctttgctattgcttcaacagcagcatactgttggacactcagacattagggcacaatttagacttgtttcacagctgtcatttctttcctcaaaaacaacaaacctgcatgggggaaatgagtctacatttcagggtttttcaagaattgataacataacatgtacttcaccatgaatttatattccacaggtccctgttctcttctctggtcatcagagtacaaaatcacaaccaaaaagcaagaattgatatctatgaagctaaagtagtagtagtagtagtagtagtagtagtagtagtagtagtagtagtagtagtgaagcaggatattaccctgatcccctcgcgggcgggaactggactgcatagccgcttcggtgctggcaggggcagactccactggctcagtctcactgagttccacccctcatgggagaggaagcacaggtgagtgggtacaggagccagggtgagtgcttttgggcgccagcaggaacaaaactctgtgtgggccccatggcagtgtctaggagggtgcccgcgacccttgaatccccagaaggagtgttacagggcccttttatctttgccatctgcagatggcttaagtgttaacagctcagtggagggtcagtgtgacagccttctgtactcgcacttgtggcacctcagatcttgcccattttccaggaggaatgaggtcacacaaactaattggagatggtaaatgcgggggattttattgctgatgaaagtggctctcagcaggaaaaggagctgaaaaggggacagagcaggaaggtaatcttcacctcgagtccagctgtccgcaatcagactcctctctgaagctatgctgccaggctgtccctcggaagtcaagccacttctctccaatgcacaaccatagtttccaacatccagctgcttctcctctgtgccggctgagcctgggatttttacaggcacaggatggagggcagggtgggctatgggtggttttggaaaaggcaacatttgagcaggaaaacagggatgtaagttctcactttgggccacagttccaggcttttaggcttaagggtggggcccttgccagagacccgccctcttctgtccagaatttccctgcctcctgtccctatcagtagtaatagtagtagtagtagcagcagcaacagaagtaatactaactactacataccaagcattatctacgtacttcatatctattcaccaacctaattgttacaactttcactcgcgtccgtgtgaagagaccaccaaacagtctttgtgtgagcaataaagctttgtaatcacctgggcgcaggcgagctgagtccgaaaagagtcagcgaagggagataggggtagggccgttctataagatttgggtaggttaaggaaaattacagtcaaaggggggttgtcctctggtgggcaggagtggggatcacaaggtgctcagtgggggagcttttgagccaggaagagccaggagaaggaatttcacaaggtaatgtcatcagttaaggcaaggaccggccattttcacttcttttgtggtggaatgtcatcagttaaggcaggaacaggccatttaaatttcacttcttttgtgatttttcagttacttcaggccatctggatgtatatgtgtaggtcacaggggatatgatggcttagcttgggctcagaggcctgacattcctgtcttcttatattaataagaaaaataaaacaaaatagtgttgaagtgttggggcggcgaaaattttcggggtggtgtggagagataatgggtgatgtttctcagggctgcttcgaggtggatcaggggtggcgtgggaacctagagtgggagggattaagctgaaggaagattttgtggtaaggggtgatattgtggggttgttagaagaaacatttgtcatgtagaattattggtgatggcctggatacggttttgtatgaattgaaaaactaaacggaataagagaaggagaaaaacaggtattaaaggacgaagaattgggaggacctaggacgtctaattagagagtgcctaaggaggttcagcatagccttgccagcaaagattatttactttaagagttaagagtggtggtttggggatagcaccaagagatatcagctgtgatggcttggagaaacagtgtaaaccagcagtgtaaacaagagcagggcatttatgactagttgagactggtgaataggagtatgactagacagaagataggagggatgacaagttttttggggtgcagtctaagttggtctggtgtctggaatgagactggggcctaataaaaaggagcgtccatacaggagcttaaatgggctgtaccttgtagcattctgaggacaggcctgaattctgagaagggcaagtggtaaaagtattgtccagtcctttttaagttggtggctgagcttggtgaggtgtgtttttaaaagaccattagttcactgaatactaagagcctgagaaactgcttgggtgatttgactaataaagtccagtctgttataggaccgtatagaggtgggaaggccaaaccgaggaattatgtttccctgtgggaaaggcctctacctatccagtgaaagtgtctacctagaccaagaggtattttagtttcttgactcggggcatgtttagtaaagccaatttgccagtcctgggcgggggcaaatcctcgaacttgatgtgtggggaagggagggggcctgaataatccctgaggagtagtagaatagcagatggaacactgagaagttatttctttgaggatagatttccacgatggaaaggaaatgagaagttctaagaggcaggctagtggcttgtactatagcatagcctgcctttgctggtgtgtggccattaggcctggtggaactgccatcaataaaccaagtgtgatcagggtgaggaacaggaaagaaggaaatatggggaaatggggttgaatgtctggtggatcagagatacagtcatgggggtcaggcgtggtatcaggaataatgtgggaggccggattgaagtctgggccaggaacaatggtaattgtgggagactcaacaaagagtgagtacagctgaaggagccggggagcagaaagcatatgcgtcaggtgtgaggaagaaaatagattttggaagttatgagaactgtagagagtgagttgagcatagtttgtgattttgagggcctctaaaagtattagggtggtggcggctgccgcacgcagacatgagggctaggcaaaacagtaaggtcaagttgtttggataaaaaggctacaggacgtgatcccagtccttatgtaagaatcctgactgcacagccctgcacttcagcggtgtgtaatgaaaagggttgggatgagtcagggagagctcgggtgggagcagtctctaaagctgtcttcaaggaatggaaagaggagtggggaaaggatttaggatctatggggtcagctaggtttccttttgtgagtttatataatggttttgttaggatggcaaaaccaggtatctaaagtcgaaagtatctaaccatgcctaggaggaaaaaacttgttgttttctagaagggattggggtttgggagattagtcagacatgatcagcagggagagcacgtgtgtttttatgagaattatgccgagataggtaacaggtgaggaagaaatttgggcttgactgaagtaatgggggctgtctgtgaagccttgaggcagtacagcccaggtaatttgctgagcctgatgggtgtcagggtcagtccaagtgaaagtgaagagaggctggggtgaagggtgcaaaggaatagtgaagaaagcatgtttgagatccagaacagaataatgggttgtggagggaggtattgaggacaggagagtatatgggtttggcaccacagggttgataggcaaaacaatttggttgataaggtgcagatcctgaactaacctgtaaaccttgtctgcttttaggacaggtaaaatgggggaattgtaaggggagtttataggctttaaaaggccatgctgtagcaggcgagtgataacagactgtaatccttttaaagcgtgctgtgggatgggatgttggcattgagcggagtaagggtgattaggttttaatgggatggtaaggggtgcatgattggtcgctaaggagggagtagaggtgtcttatgcttgtgggttaaggtggggagatacaaggggagatgtgaaggaggctttgaactgggggaaaaggcggcaatgaggtgtggctctagcctaggaatagtcagggaagcagatcatttagttaaagtgtctcggcctaatagggaactgggcaggtggggataactaaaaaggagtgcttaaaagagtatcgtctaagttggcaccagagtttgggagttttaagaggtttagaagcctggccgtcaatacctacaacagttatggaggtaagggaaacaggcccttgaaaagaaggtaatgtggagtgggtagcctccgtattgattaagaaggggacggacttaccctccactgtgagagttacctgaagatcggcatctgtgatggtctagggggcttctgaggcaatcgggcagcgtcagtcttcagccactaaaccgagaagatctgggaaggagtcagagagccttgggccagagttccaggggctctgggagtggctgccaggtgagttgaacagtccgattttcagtggggtcctccacagatgggacatggcttaggaggaatcccgggctgcgggcattccttggcccagtggccagatttctggcacttgtagcaagctcctgggggaggccattctggaggaacccctcgcagctgcagttcaggcatttggagttcttctgtgctggagatatggctggggtttgtctcacagtggagggaaggaattgcaactcagaaatacattgctacttggctgcctctactttattattgtacaccttgaaggcgaggttaattaagtcttgtggggtttgagggctggaatttaatttttggagtttaatgtcgggagcagattgggtaataaaatatatattgagaataagacggccttttgaccttttagggtctagggctgtaaagcatctcagggttgttgccaaacgagccatgaactgggcttgtttttttatttgatgaaaaagagcctaaacgctatctgatttgggataaagaaaaaggagcattaaccttgactatgcctttagctccagccacctttttaagaggaaattgctgggcaggtgggggagggctagtcatggaaggaaactgtaagccggaccgggtgtgaggagcggaggtgataaaaggattatagggtggaggagcagaggctgaggaataattgggcctggcgaggaggggagaggtcagatgggtctgtagaaaaggaagattagaaagactgagcgatgcttggggttgggactgaggggacaggtgggagggaaagaaggaagatttggaaggagttgcattgggaacagagactggggaggggcagatgtgtaaaagaatgcctggacatcaggcacctcagaccgtttgcctattttatgacaagaattatttagagcttgtaggatggaaaaattgaaagtgccgttttctggctatttggaactactgtcaagtttgtactggggtcaagtggcatcgcagaagaaaataaggcatttaggttttaggtcaggtgtgagttgaagaggttttaagttcttgagagcacaggctaagggagaaaaaggaggaatggagggtggaaggttgcccatagtgaaggaggcaagcccagagaaaagggagtagagacacggagagaaggggtggggggttcttgtcccccagaaaagcggagaaggggtagagacatggagagaagggttggggggttcttgcccccgagaaaagcggtacttgccgctaaaggtgaaggaccaaggcaggcgtccccgtgtggtcagacacctctgaaatgtgggtgaataatcaggcaggcatccccgcgtgattaaataccaagggaagactcttccgagtccgtgaccggtgccggagttttgggtccacggataaaacgcatctcctgtctctaccagaaaaggaaaggaactgaagttaagagaagggagagattgaagtggggcgccaagattgaaaggagaaagaggttgagggatagtgagaggttggaggagagagtaaaaagaggccgcttacctgatttaaaattggtgtgatgttccttgggctggttagtctgaggaccagaggtcgtaggtggatctttctcacagagcaaggagcaggaggacaggggatagatctcccaagggaggtcccctgatccgagtgatggcaccaaatttcatgcgcgtccgtgtgaagagaccaccaaacaggctttgtgtgagcaataaaactttttaatcacctggatgcaggcgggctgagtccaaaaagagtcagcaaagggagacaggggtggggccgttttataagatttgggtaggtaaaggaaaattacagtcaaatggggggtggttttctggcgggcaggagtgggagtcacaaggtgctcagtggggaagctttttgagccaggatgagccagggaaaggaatttcacaaggtaatgtcatcagttaaggcaaggaccggccattttcacttcttttgtggtggaatgtcatcagttaaggcaggaacaggccattttcacttcttttgtgatttttcagttacttcaggccttctggatgtatacgtgcaggtcacaggggatatgatggcttagcttgggctcagaggcctgacaacaacgatcttgtagataggtactgttgtaattcccagtttacaaataagaagactaaggtatagagagattgagtaatttgcccaaagcccacagctagtaagaagccaagattcaaacccaggtaatatggctgcagacctggtaatcctaaccattacattaggctgactctcgatagttaacttatttaagctagtgttaatcacatcttaacaagtttgagtaataaaatcttaggttgaaaggggccttcaagatctagtctaaatcctttcaggagttcttccacatttctgctagaaaacactttggcctaggcttaaaacttagtgatggggaactcctcactttgtaaagcagcctgttcagttcacaaacaccctaataattaggctgttatctcttgcattgagctgaagttgatcttcccataacctctgcctttctgtctatatgtatgctttggaaatatacacagtaagtgtaaaccctcttggcaaagacagcccttcaaatacttgggaggcattcaattccccccgccacctcccgctctactctcactaccaagtctttagaatagagtacaggtatcaaaatcaaaacaaacagggagtagaaacttagtgccagactttaagtattttttacttataaaatctttttgtgtaacgagtagagcaactcctaactgcatatatgtactaagtttgcaaatggggcaatttgtttttccccatgcactggcatcagaggtggtaaatgctggcctgtcagattcaatgcattttgctgggttagaaccgcaagggctttccaggggaccaagctctctctgctgtaatcattaaaacctgcagaatcctgtgtgactctggggagaagcccagtgctcttggccctcatccaccctcactaggaaagctgcttaaaactaggacagaagaaacaaccactggcttaggatcagtcctcagacctgccttggcactaccccttttattccaaattttgcagtggcacctccaacttcttggtcacgttttgtaccttgtctgtttcctcatataacttcattccaaattccaacccatgctctgacatttcctctccattcttgctagacaggaatttctggatattggatattggcccctgcccataccctgactctgtatattcttttgtcctgctgaccagtttgagcttctgaataacaaaaactccccaaccactttaaagtcctctactttagcttgatgggtccctctcctgtattttctgaccttgactctgctctctgtacaaatagtaattacactcacccccaagcagagaatctgtgtcaaaatccatcaggatatctaagcacatcattatatctgtcaacttccccagactcctgatctcaatcccttattttcaacaacctggcaccgacagagtataatttcttttgtatcatgatgcagtttgatgtgcttttcgaaaggttatggtggtgattttaaagagatctgttttgttagaggaaggaaggaaaatagtgctgtttgcttccatgcagttcctcagagcctatgccagggtgatttcagctcatgagagaatctaaagtctaaagagatgtgtggagattagaaacattggtgtaaaaaatcagattacggagacgtaatatccagggtgtcagaggaggcagggagcttcaatcatgtttgaaactataggtcccacccaacaggatgagaaaatacaggagaagccagaaaaggtacctgcttgtgggtaaaatcaattaaatggaatcaatggtatggtagccatcatttctttcttttcaaattgtggtaaaaacacataatgtaaaatttaccattttaaccattttttagagtatagttcagtaatgttaagtatattcatgttgtcatgtagtggacttgcagaactttttcaccttgcaaatctgaaactgtacccattaaaccacttctcatttcctcctttcccccagcccctggcagccatctttctactttccgtctctatgcatttgactattctaggaacatcatgtaagcggaattatacagtatttgttcctttttggactggcttatttcacgtagcataatgtcctcaagtatcacctattagctgtcattgcttgaacacggttttctgccaagcacatgatctcgttttattcccagcacaactctcaataacaactgtgtaccttttttccctttcacagattaggaataaaaggctctccaagactaggctcagaagcagaagcagttggagagttgcttgcagaaggattattgtcatactgggaagtgctctcaggatttacacctctaagaaactgaaaggggcatgactgcgcagaggaaaagctggttcaccatgcagttgcaattatggctgcagcaggagcatgcagggaagctctggagtaggtttggcctttcagagttgtccccagtaaatcaaatgggtgaagactttaacccatttatgctggaggttgcaaaaatgttttgtgaaaagtcagaccttggcgatgaccttgagcagtaggatataaaaaactcccacaagcttagcgtcccaataatggaacactaggcataaatgagttaatccctgcatcagccagtcattggccctaggtctctccctgagggaggggatgtagctgtgtgaggcagttccctgagggcacattccaatgaaggccccagctgtgagccagcagccaataaggcagcaggtggcccatgcatgcaaaggccctaaagaggaggtccagggtggagcgccacggtgtctactacagatgctgaaagagtaaatacattttatttatttatttatttattttattatactttaagttttagggtacatgtgcacaatgtgcaggttagttacatgtgtatacatgtgccatgctggtgtgctgcacccattaactcgtcatttagcattaggtatatctcctaatgctatccctcccccctccccccaccccacaacagtccccagagtgtgatgttccccttcctgtgtccatgtgttctcattgttcaattcccacctatgagtgagaacatgcggtgtttggtcttttgtccatgtgatagtttactgagaatgatgatttccaatttcatccatgtccctacaaaggacatgaactcatcattttttatggctgcatagtattccatggtgcgtatgtgccacattttcttaatccagcctatcattgttggacatttgggttggttccaagtctttgctgttgtgaatagtgccacaataaacgtacgtgtgcatgtgtctttatagcagcatgatttatagtcctttgggtatatacccagtaatgggatggctgggtcaaatggtatttctagttctagatccctgaggaatcgccacactgacttccacaatggttgaactagtttacagtcccaccaacagtgtaaaagtgttcctatttctccacatcctctccagcacctgttgtttcctgactttttaatgaccgccattctaactggtgtgagatggtatctcattgtggttttgatttgcatttctctgatggccagtgatggtgagcattttttcatgtgtcttttggctgcataaatgtcttcttttgagaagtgtctgttcatgtccttcgcccactttttgatggggttgtttgtttttttcttgtacatttgtttgagttcattgtagattctggatattagccctttgtcagatgagcaggttgcgaaaatttttctcccattttgtaggttgcctgttcactctgatggtagtttcttttgctgtgcagaagctctttagtttaattagatcccatttgtcaattttggcttttgttgccattgcttttggtgttgtagacatgaagtccttgcccatgcctatgtcctgaatggtaatgcctaggttttcttctagagtttttgtggttttaggtctaacatttaagtctttaatccatcttgaattaattttcgtataaggtgtaaggaagggatccagtttcagctttctacatatggctagccagttttcccagcaccatttattaaatagggaatcctttccccattgcttgtttttctcaggtttgtcaaagatcagatggttgtagatatgcggcattatttctgagggctctgttctgttccattgatctatgtctctgttttggtaccagtaccatgctgttttgcttcctgtagccttgtagtatagtttgaagtcaggtagcgtgatgcctccagctttgttcttttggcttaggattgacttggcgatgcgggctcttttttggttccatatgaactttaaagtagttttttccaattctgtgaagaaagtcattggtagcttgatggggatggcattgaatctataaatttccttgggcagtatggccattttcacgatattgattcttcctacccatgagcatggaatgttcttccatttctttgtatcctcttttatttccttgagcagtggtttgtagttctccttgaagaggtccttcacatcccttgtaagttggattcctaggtattttattctctttgaagcaattgtgaatgggagttcactcatgatttggctctctgtctgttattggtgtataagaatgcttgtgatttttgcacattgcttttgtatcctgagactttgctgaagttgcttatcagcttaaggagatttggggttgagacgatggggttttctagatatacaatcatgtcatctgcaaacagggacaatttgacttcctcttttcctaattgaataccctttatttccttctcctgcctgattgccctggccagaacttccaacactatgttgaataggagtggtaagagagggcatccctgtcttgtgccagttttcagagggaatgcttccagtttttgcccattcagtatgatattggctgtgggtttgtcatagatagctcttattattttgagatatgtcccatcaatacctaatttattgagagtttttagcatgaagggttgttgaattttgtcaaaggccttttgtaaatacattttttaaggtcacacaaatgacatatgggacagaacagtgtttaacttcaaaactcatgttctttctgctatactgggccttctctccgaaagaggcctaatttgcacactacagtcaagcttagaatctattcatagttaaaatgtggagtcaaagcccaggaactatgtccttcaattcatctttcattacttacctattccttatcattcccgctgacaccaaccattttttctgacccttgtcatgaggagtgaagttgtatcattgcagcagctttctacttgtactctatgcctaaaatctctccttcctccatctggtcagccaattgctgtcaagttaatcttgcaagaacactacttttgccagtttaatttcgcaaaactcctgctgtgtgccaggagtgtcccagacatcaggtagtctaagataagcgatagtctctgcccctaagccgtttgcaacctttggagagacaacgtcattatcaccaccagcacccccattaagctcagagctaatatatgccagatgagactctgccagtcactgtgctaaggacttgacatacgttatctcccttaattctaacaactactttctgaggtacctctgatgagtagtatcatttttagatacaaaagcagaaacttagcgagttaagtgctttgcccagtggctctcagttgagaaacgaggtagtcacaccaggcagtccaacttcagtacctgagttcttaatcatcatgtttacaactttggctcaacattgtcaccaagatcgggttcaaatacatccattatcaatattctttctgtctccttgtatgtccaaacaaacaaaacaaatgcttccctcctgatgaggaaagtctccaaatcttgatacctgctgtgtctggacagtttttcctgctatttgctgagtgctggaaggattccctcaatccagatgtgattgcagatccagctcaagctcagcgtcctccagggaacctttgaactaaccacccagaaacgagcctttcaccggacactactcattttcacatatctagatcttatttccccatctgaactgtaagtgtcttaagagctgattttgttgttttttaataaaaaataattcttagttttttttcttattaccaaaaaattattcgccattgaagccttctgaatttttaataagaaaactattggtatattgcttcaaaaagaaatctaagcttctagattcttgaaaagggatagtgacagaaccttagaattaatattcaatataactaatctgatgaaaattcagtcattgatacattactgagaactactagatctcagcatttttaattgtagattcacatggagttgtaagaaattatacacggactccacatacctttttaccgagtttcctctaatggtacacctgcaaaactctagttcaatgtcacaaccaggattttgacgtcaatattgtcagtatacagaacattttcatcactacaaagatccctcctattggccttttatagccacacccacttccctgccccccctacctcctacttccagcaactactagtctgttttccatttctttaattttgttatttcaataatgttatatgaatggaaccatacagtatgtaatattttgggatggacttgactcactcaacataattccctagagatttctctttttatatgcagcaagacttgtttcctttttatcgtgagttgtatgctatggtttggatataccctagtttatttaatcactcaccccttgaagacatctgagttatctgtagttttggactattgtgaataaagctaccaacattaatgtacaggtttttgtgtgaacataagtttttatttccctgagataaatgctgaagagtgcaattgttaggtcatatggtagttgaatgtttagttttaaaactgccaaacttttccgaagcgtctgtactattttatattccaccagcaatgtatgagtgatccagtttctctgcatcttcaccaacatttggtgttgtcattattttttatttttagccattctgatatgtgtgtaggaatatctcattgtgcttttaatttacgtttccctcgtggcaaatgctgttgaacaacttttcctgtacttgtttgccatatgtatatcctcctcattgaaatgtctgttcatgtcttttgtctattttctaattcaaaagtttttttatagttcggttttgagagttctttctgtatcagatactagtcctttcttgtgtatagggttttcaaatgttttctctctcatcttttcatcttcttaacaggggatgaaaaagaattttaattttggcgaggttgaatttatcgctttttccttttatggatcatgcttttgtgttgagtctaagaatactttgcctagccctggatcccaaagattttctcctgttcttttttttttttttttttgagacggagcctcgctctgtcgcccagcttggagtgcagtggcccgatcttggctcactgcaagttccgcctcccgggttcacgccattctcctgcctcagcctcccgagtagctgggactacaggcctccaccaccacacccagctaattttttgtatttttagtagagacggggtttcaccattttggctctcctgttttatatgtcttatagttttacattttatgtttaagtctgtgatccatttgatttttatataaagtatgaggtttaagttgaggtttattttttgcatatggatgttcaattgctctagcataattatttgaaatggctggcttgattattgaagtaaggtcagacttatttctctcctgggcttcagacccagccaccttctatgtttcttgtccaccacaacctgaatgtcccacagacacctcagacttaacatgtccccagcagctcattattatcctccttttgtcccaatccaccctcaacatttttccctccctaattgtgctgttcttatgaacgctacgcttcacccaattgcccaagtcaaaaattagggtattatttctgaatctacttttatctttaaatctaacatgatgcattgccaaattctgtcagctctatccccaagccatctcttaattcattcccttatttacacctcccttgactccaatatcttttgactcaaatgctacatagcctctaatttatctccctgatattgttcttgcttccgaatcccttttccacaatgcgcctatagtaatcctcctaaaatgcagatctgattaggtgactctccttattttaaagtctttcttattgttttctcctgccctaaggcagaagttccaacaaatcttgttatcagattctggattaaatcccggcctcagcagtgggacctaagatagtgcctgaatttccatgaacatttattgatgacaaagagggtcttaaataatgagtgatgtagactttccactgtcaacatcacagattctggtttttaatggtattcacatttgccttctccaagagtccaggtttaatgatggtgagacctatcctaagacctggctttgtagtgaggggttacctcatcacagaatcaagaagggacctcgggccgggcatggtggctcatgcctgtaataccagtactttgggaggttgaggtgggcagatcacctgaggtcaggagttccagaccagcctggccaacatggtgaaaccctgtctctactaaaaatacaaaaattagctgggcttggtggcacacacctgtaatcccagctacttgggaggctgagacaggagaatctcttgaacccgggaggcagaggctgcactgagccgagattgcaccactgcactccagcctgggcgacagagcaagactctgtctcaaaaaaaaaagggcggggggacctgggtgcaagtaattctaagaagcaggaataagagaacaagaagaatgaagcgacaaagaaagatgagcaattctctggaactgttgagaagtgtacagaagaaaacaaatctggatataggtagctacagcctgaaatatggaaagccagagcatgtgtatacctgctcctgctcccactggttgagaattgattcctttttcatctgatatgggcaagcattggatctgagtgggacacatcctctccagtgcacccctgccttttccgctgctctgaacttcacacaacgtcggaaagattcaaaacaatgtagaaaatctaagtataaatacaaaaaggaaacaagaagtttttctatcaaagctgtgaactatatgatatgagtaagctcaataaacactgtgcagaagttgggaggggaaaaagagaattgctgccaaagcactaacccctgtggctggctatgcttgcccacccaggaagctcccatgtcatgggggtcaggggaacctagaacagaaagctgaaaggctcagggatcccttttgagaagggatgctggctatacagcacgagttagaacttgcacagaaccgtccactactgctgacactggaatcacaggtgggctgacaagatgtgatgcaagcaccagacatatttgctacaaacctcaaagtggagcagagcagcggcagtgtcagtcttcttggtgtcaatagaatacctgtttatttgttgaattctccctatatgaataataataatacaagaattcaaagcaggataggctttgtgtcattggaggagtatggagaaccatcagtgcagtaagtgtcgtgggaggtttctagacagtttttaaaagtcgatattgagtcaaccatcaaatgtgaacaattctgatatgccagagcatttgtattcttaactcatggggttattacaaagatcaaatgaaataatcattataaagcactttgtgcagtgcctggcacaaagcacgcactcaatacatgttaatgtttatacaattattattattgattgtcagaattatcagccccacatcagcaaagaatagtaggtggtctgtcagcaggaacatggaaacattctcattacatagaagtcagtgttgcagggacagtcattaaaacaggatctaattttagtcttctgagggaaaatgctaggttctccggaaatgttgaatccttcctcgagcatgtagtttaatttttcaaaattatattgcatatcctgtaaaatgaaaatgaaattgtactgctgttcattaaaggcccccaaaaatcttaggcactatacaatataaatgaaaaaaaaggcgttatttttccatagggcataattagaaataaagaagcaaggtcactcacaaatttccgagctataaaggaggaaaggaacaagattttcccccggttattttatagctgccaggttgaactcatacttatccaatgagccccagaatggaataccgttctacaccaactgtactgatgatagtgattcagggagtaaatgataagattccatccttctaaagtgcttttgggattggattctagtaagtttcattttgctattggccaatcacaaaagagactacaatagagaaaagtgaagacatcatgctgaagacagactgctgcatagaaaaggaagagggaccccctaatttagagatatggatggagaaaaaaaggcacttatgctgtagcataagggaaacattaaataaagctataatagaggagaaaatgtctttgaatagaagaaaaaaatcagacagacagaaatagactaaaatgctaaaaaaaaagatacaaaaggacattgaaggggacatacagtgattattacacaaattaaatgcacacagttaaaagggaggtgaaaagcttctaaaaagaatgagtgtgtagtgaacttaattttatcatctttactaagacaaagttaaagtccctaaaatattttaagacacttaaaaaaaaaagtcttaaaattttgagagcctttcagctctgtcaactctagactttccctcctacttaagttttttttcttttttttcttttatcttttttatttatttatttttttttttatgttttttttttttttttttttttttttgagagagagagagagtggatcagccttaataagagaatggtcttctgccaggtggtattctcctaatccctttccagtgagatccacaagggttcaaaaccactttctggggtcttagaggcaccacttatctctcttcctctgctcatatctttctgctccagtgcccgcatagtttgtgttatcagtggtgcgtagcctgagacatccacgacctatgccagctctcgaagtaatgtgattggcatccaaagaaacacaagaagcccatgatttcgtccctttgcaatttaaaatcatatttaaaatgccttttggtcatacaaatttgaaaatgatcttgtaaatcacttccgggaatctatggtcaaaactcagcttagagttctctacttcttaacagagtgcctgccggtaactagtgactgtcaatgagtttgaaaacataaattgatgtgcaaatgctagataatagcaacatcctgtgcaactgggcagcatttctgttgtttggcttttttattttcgtggactctcccaatctgagagaaaatagatttgagttcctttttaatcggtttagacccagacaaggatttaattggtttagaccccattcacctacgtgtgtcactctgtctccaacataacagaggagatgaccaagacaacatgctctccagccaggaggtggggaatactttggtgtcatagcagacaattattgatggaaaactcatgttagaaaatgtaaggtaccttcttctagacggagtaaaaggggcagctgcccagactttcattttaaatagggagcccatgatacaaatcttttaatacaattttaaaaagaagagacatagggggtatctcttaggacctgtcaacaaccaaccctctatcaaatggccaaatcacaggtggtctgcagcttagccaaaatgtccaagtacctttttgtaacacagaatctcctttgaagatccagctttcattaatgatccccagcagctctggtcaatgtgtcttttcacaaatgaagctttttaaaagctttcagtggacaaatgtggctttgagttttcaactaaatctttctgtttaaaaggagtgctgaaatgggcatactttataatcttaaatgctgcacacaaaatactgaaatattattgaccctgagaggttggttcaaatcaaatagcatactcacgtaaacgttctcttttcctaatattagcaacagggaatgtgaaatagagaggggcgggatatgctggataggggtgcaccaaaattttcaaaaagcctcgaaactagtgtatattgataaccttgtggcatctaatatctagtattctttttttttttttttttttgagatggggtctcgctctgtcgcccaggctggagtgcagtggtgtgatctcggctcactgcaacctccacctcccgggttcaagtgattctcctgcctcagcctcctgagtagctgggattacaggcgcccgccaccacgcctggctaattttttgtatttttagtacagacggggtttcaccgttagccaggatggcctcgatctcctaatctcgtgatctgcccgcctcggcctcccaaagtgctgggattacatgcgtgagccaccgcacccagcctagtattctatgtctattatttcttcataatgagactgggggaaatctttggagaattaatgccgcagttggtaaaatcattctataataatgggtaccattctgctctgtcccacatttttatgaagtctctttaaatttaaaaaggcaatgtgctttgtggttcttgagcaacttaaatacgttgctctgaatagttattgtgatgaggtaatttgtaacaacttttaggatcaatgctaattttcttaaatgtttctgtagtttcccctttattataaagtatattaggctggactcttggctgtaagtgacagaaaactcaactcagattagttaagaaacaaaagggtgttggtgacagtggtggctttcagactattgctgcaggcccacctgccatcctcttaacaccctcaacataccctgcagaaaagagagagctactctgacccgagagcttaaagactggtcaagtatgggcttgactctttatggcccaaattgggtcacatgcccacctaggctaggggaatggaatcgtggaattgattgattgattattgttgcaggttgagtcctccaagaagcagatgccagggcagatttattgcagaataacacctgtgaagaaataggggtggaagcagaattgaacaagggaagccatcagatcacaatgcagatcttctagactctgtgtcagcacaacaaggaatgccagagcaaagactgccaattagaggaatactgaattgggcagatctgacaatagtctgtatataactcgggactgttaacttctccttcctcaaccagttatagacatagaataggactctcttatctcaaacatcaatatctgtgtatatgaagtagagggtgaaagtttactgtacactagtggttctcaaccaagagcaagtctgtcccccaggggacatggcaatttctggagacattttcagttgtcccaactggtgaggaggtgctactggcatctagtgggtagaagttgtggatgctgctaggcattctctataattcgtgggatagatagcacaacaaaaaattgcccaggccaaaatgtcaataatgctgaagttgagaaaccttgctctataaagatacatgtcttggccgggcacggtggctcacgcctgtaatcccagtactttgggaggccgaggtgggcggatcacgagatcaggagatcaagaccatcctgggcaacatggtgaaactcatctctactaaaaatacaaaaattagccaggcgtggtggtgcatgcctgtagtcccagctactggggaggccgaggcaggagaatcgcttgaacccgggaagcggaagttgcagtgagccgagatggcgccactgcactccagcctggtgacagagcaagactctgtctcaaaaaaaaaaaaaaaaaaaaaaaaaaagatacatgtcttatgtgtactgaaagaggccacggaaaccttttgttgatacattcttgatagtttttgttcttatatgtagttatgaatacttgagattccatccaatttatttaacttttgaccagaaagggtagattgaattggtgaaacatctatatcctgaatatttaaaagattctgttttttaaaacaaatattaacttgaattaacgtaaatattcttagtagttaaagtccttaaagaccttagtttggtgaacagataagaatcatctgtgttcagcatatgcattgccttatgaagatggtaagtcaaaagtatgagtttatttctgatatttaaatatccctgaggtatagatttgtttactctggaagtttactctgttgtttgtttgtttgtttttgtttttgttttttgagacggtgtctcactctgtcacccaggctggagtgcagtggcacgatctcggctcactgcaagctccgcctccggggttcacgccattctcctgcctcaacctcccgagcagctgggactacaggtgcccgccaccatgcccggctaatttaatttttttgtgtttttactagagacggggtttcaccgtgttagccaggatggtctcgatctcctgacctcgtgatccaccagcctcggcctcccgaagtgctgggattacaggcctgagccaccgcacccggccttactctgttgttttatttcttcattatatattacaaagttgaatgttagggccaggttagatcggaaaacaagttaagtattccttatccaaaatgcttgggaccagaagtgttttggattttttatttttgtggattttggaatatttgcatattcctcatgagatatcttgggatgggacccaagcctaaacatgaaattcatttatatttcgtatataccttatacacataccctgaaggaaattttatacaatattttaaatacttttgtgcgtgaaacacaaaagttttgactgtgacctgtcacatgaggtcaggtgtgaaattttccacttgtgacgtcatgtcagtactcaaaaagtttcaaaatttggagcatttccgattactttggaaaagtctagaaaaagtttgatatcagtgcactgaaatcattttcaagtaggaacaatagcgatactagccctttactcatgcaaaattcacagtttttatctaaacaacacaaaatcattcaatgcttttatatttaatcatctatattcacctaaccataaaaaatcaatttcaatacagtaaggaaaagacaagaaaacgaatcattctaatcactgtattttgaaagttctttgcaaacaaccgtgaaatggttaaaagataggaggatggagaccagcctggccaacagggtgaaaccccatctcttctaaaaaatacaaaaattagccgggtgggttggcgcatgcctgtaatcccgggtactcgggaggctgaggcaggagaattgcttgaacctgggaggcaggggttgcaatgagctgagatcatgccactgcactccagactgggcaacagagcaggacgtctcaaaaaaaaaaaaaaaaaaaagatggtaagagaatgatgacttgttgcttactaaaataaaggaaagattgacactataagtgatactgtttgaaatctcaggaatctctgaatcattaagattatatcacaaatggcatgcaaaatacctgttcaaaaaatactcctcatggacatgagatgctaagctgctgatactgagtctgacctaggacaatgatgttctgtgtcacctcttttctgatgcctcccagattgctcctggcctcactgctgtctcacttccaaaaatacatattgcccttattggtcataacacagagactatcagttcaaaagtctctaattcgtctcagctgcagtcatctcccagcaagacacaaggttcttgagaaaagaaatttttcatgtcccatctttgccatccaccacacgatgaacatacagtacagtgtacatagcagcccttgaaaatgctggtggaatcattgattcttgaacccaactgtcatactttccagatttaagtcctggtaaatgattaaaatcgtatgggttaccctcaacaaaccagctcaagtatttactataaaaaagggaagctagatatggaacttcccctaaagatgggtctgtcaaactcaccccattgtattctgctctgacaccatgttttttgtttgtgttatttttttttaagagacagggtctcactatgttgcccaggctggtcttgaactcctgggttcaagtgatcctcccacttcagcctcccaggtcactgtgagagattacaggcttgcaccaccatgcccagccccaccttttaatacaaataagtaacagttaccatttactcagtgctcaccttataacagatgctgttaaacgctttacacgccttagctcatttttagttaaatacattgtttttgccccagctatggtagggatcttgctaacaatgagaatgaatgataagaggggctttaaggagaattcactgccacacctttcataattttcccatcattcctccagtctttgttcaaccgtccatgatttactgatttgctattacatcaaactatgctgcaacaaaccagtggttccttctgatttttatccatctcctcctcacctagggtgagagtctgaggcttccttgagtctactttctgatattgttacatttaacacagaacatctcttgttttcgtttctggcagcttatcctctcttcgctttctccatgctttcattcatcctaaaacaccattctgacaatgatatttaggttggtacataagtaattgtggttttaccattaccttcaatggcaaaaactgcgatcacatttgcaccaacgtaatatttttcttacttaaaaaattaatgtagagtatggaaatacttgccatcagggaatggggaagaaaatggctagagagacatggtgaaagagagacttgatttttaaataactttttttgtttttcttgaattttattatcatgtgaatgcatttgaaagaaatacaattttaaaataattattaaaaaaatatttgaatgccttcccatgaacaactaaatgaagtctctattcttaaacctgacagtcaagtacagctctggtttgactccaagctacatttctagccttgtattattcaactctttttctgtttatccttcatatccgggcctttactagtgccaaaaaaaaaaaaattgctcattctactcttgtcacccagagtgtttcttctgtttttgcccatcaaaagcttacccaattgtgaaggcccagtttcaaagcaacctccttcattaatttcatccagatactctgtaacccccatagctgtttaggcttgttctagcaatttgcagttatcagaaaaatgagtacataccgagtgccagaaagtggtctctccaactgtgcacattacaacatctcattctctgtgcctccatttcctcatctgtaaaatggtcactatggtgtactttcctcatagtgatgttcattctttcaagtagttagttaggtacctactatgagacaggcactgacctgggtcctgggggtacagtaatgaataaaatagattgagtcctgccctcatcaaatttaccttctgataagaaagacataaatgaaatatacctataatgctcttgaaatagcacttgggatatagtaaatgctctataaatgtttgctattattactgtcattgttggtagtgttgttatgtggtatttctattaacacataaagaaactaaggttcacaggctgttagataagatgctggttaaatagctagtaagggactccaactcaggtcttcctgagtcataaaattcgtggcatttccactacactgatggatgtataccaggctgtacatcagaactatctgtggagacttaaagaaagtaaagattctcaagcctcagcctcaaattaactaaatcagaaattatttagacgagctaagaatctgtatttttttgaaaagttctcaaatagttgtgatacactgtcaaattggggaatgactgcactacattaaaatctttcccataatactttattatgcttatttgtaaatatcaaatctacaaattcactaaagaccatccccttgttttcttatttatttttattttttctgcttcctctcctagcaaagtgccttataaacactcaataagtatttgagtaattaatggcttaattatttaaagttgcacttaaaatgcaaatactcacagctgtggtactggaagcctgttatgaacaatcatttatcttcctagggttatttactaatcagctaaggacaagcagttgggaaagaaaggctgactatttgggaacagaactgagaaggccctcaaaccaaatgttagccacgttattgaacagcctagggccccgccttaactttacctacacttcgttgacaatttcaggtaaaatgcagaaaatatacgctaacaatcaggagattcctccctcacaccattgtagtttcatttcttttaagccgacacatgtctctcttatggaaaatatgggaacaacctgttttaaagaaagaaaaagaatcctttattcttgtcacaccacaaacatggagttcactgctatacgttaagattataaagcaaaatcccaaaaacgcagtgactgattattcacagtagacatatgaagtcaggaagcttattttttctctctttgctaaggcacaaagcctggggctatatgcatttttattacactgtactgtgttgatttcacttgaggattaaaaagagagttgaggcacagtgcacgtatcttgatggattttaggatttcttgctttcgtgaaagaaagaagcttataaagtacctcagattatcgcccagggaagtgtacctacttccatgatgacctagaaattcaatcttttgtttctcctataaaagatcacattgtactttggatgttttccctgtagttttctgcactatgtaaagccacatttggaaaaacaaaatagttttagtttagagttgaagtgaaaatatctgaaatagttcaggaaagtcttatgagcatttggggagcttacaaacagccttgggggtggggtgagggggaatgagggaagagggaggcagggggagagaagaggagggctaggtcagaagtgtgcaaagaagacagagggagagagaccgtagagactgtgagtccatggcagagttttaattctggttctcacacatctacacagagaaacaatggaagcacattgctccatcccctgtcctttactaagaagcgtgaagtaaataacttgtggcttatgatatgcgaagaagagagaagacagaatgttgtaggatttggaagtacagtagatgagatcttccggtttattgatttgtaaagaacggcttgatactggtttgtcagttctgcatcagtgagagaaaagaaaggcgcttttcagtcacttgccagaggaggagagccgggaagtggaaacagggtcttctggcggacaagcttccttgagtggtggtcaaattgactgtgaagggagtcaaggtcaggaagctttggaaatgctgcaaggatggtacgggatttaaggagggttgatttcctcggttaagggttgttgcagacttcagcaaattcccccttccagcctttattaaagaagtgtttagtagaacaaactgaaaatctacaagtatattgttacccaaaatataaaagcttctgccactgagatgaaaatgtttgatttccagtgctttatctttttgcatttatctacctgtttcagtcattcgttaatatgaatttcctaatatatgccgtcttttttttttttttcggacaataccagttctatggtatctcactgatgattatttcaaattgccacttttgttccttggaaatactcctgtgttcaaataccaggaggcataattatgtaattaccatgtgaacattatgctacttatgggccaaaatgcccctagaaaggaatgctccaatggcctcagaaaatttctgtgagaacgatatcttccaaatgtggtataaataaagctcaagaataaatagctaaggctggaatgtaaatgatttaatgtaatgatgttgtaaggtgagagccacttgactttagttcctgttgcaaatcatgagatacattaggaaaacttttaaaagggaacctattttttaagataaaatctgtatcaagttacatcaccttccaggcaaagtaattcaactttcctcttttctctctgagaccaaaaaaaaaaaaaaaaaaaaaggcagaagaaatgcttcctatgatctcttctcttcctgtcacaattttcataagtctgtagatgtaattaaaactaaagattttgacaaatgaaacaggataggaggttgattgctgcttttctaaattaaaatgaatgatacccttaaggtacttgggtctatgaagtcaatttaatgttgatataacctgactccattatcacagaatgaggcagttgcataagcaagaaaaccaataaacaaacatccaaagtgcattttagaaatcggtgaggtgaaagattaaaggcttaacaacggacaaagagcttgctgttttgttctctcttgccttccagtttgatggcagagttcatcagaattagaggaagaatgttcttggagaagcgttgggctggcactaggctaggagtcctattcatatcctgcctcgcttgtcttgcaagcatgcacagccccttcatttgaggcactgtttgcctcagcagagtctgtgtactcttctggtaggttgtatagaacataataaagggggagggctggaggagaaaggacagaaaaaggagggaataaaaaaaggagtcagattaagaaagaagtcagcacagaaatataaaatggaaggaaaaaaagctgtgatgcaggaaccttaaaaggtagattaaggatggtctcagatggcacggcattagtatcaatgccataagtcacacaaaatctattaagaattatgctcctactcagagtgagtgccatgttagcactagttgtttcccgtgatctatcctgaagtcaaacgcaagaaacactgtttaactcctaagtgccctaatgtcaggaaaacacagaaataaactcaaaggaaagacaattcagttaatctttgcattcaacaagcccaggttgttttgccgcagagctatacctatcacaaaacttcattccagaagatggccggtagaggtggctcatgcctgtaatcccagcactctgggaggcccaggagagtttgaaatcaagaccagaacttatctcagactttttttttttttattattttttcagttacaactcaaaagaatcagaattagaataataatggattttaactgaaagggattaccattagttaaaaggattttaactgaaactgtaatcagtctcaggagcgtttcccggataatgtttgggcacgtatttatgagtgttacttgtgaggatttgggagtaagaatgaacgaggaagttcctcccccaacacagacacatgcacacagaaactgtacaaactgaaaaacttcaggacaaaaactcgtgaatagactggagagtcatttgtgtgcatatgtgtggtttatttactagcatcacagcacaagagtttctgtcttttgcttttgtttttgttttaataggctcatttgtgtaagtgtcatgtctgtttcttgcattcccatggatatttatctagggtctagacaaactgagaaccagaaaatcaaaacatacgttcctagttacatattttctctagactggagtaaacatgatttatgtatgtagtaatcagtaagatgtagcttggacactaggaagaaaccacattgcctagcagtgtatttccacatggggaggtaatgcctgtctctcctaaacttctagtgaagataaaactcaaagtagagtaattaacagaaaggtcaaaagacaaagtggaagcccttgagaatctaaaacaaagttaaagaaccaacatttacatttagataaatttatttgaaataatttctaagagccatgatgttgttatcggtcctttttctttctttcttttattcttttggcttatttaaaagcaatgttgaagaaaaaatgaaataaagcttatctttcacaatacacagaggaatggactgagctttgggaaacagtcacagcttggaattaagagtgtgtgtcgtatcgtaatttagttggatgatttggtgctcattcattatacccagaattacgctttcaagtctaccgtattcatacttatctcagtgcctgacaaataagaggaactcaaaaagcctttcattcattcatccattcagtatttcttgatcatcttctatgtactaggcattgtgataaattcttaacaagacagataagatctctgtctttgtggacaataaacttacattctagtcaatatcttttgaatgaatgtagtgatatttcttactgaagctaagaaaggaaggtctctgcaaacagtatactgtctacagaactcatctgaaatgagaagaccaaggagaataatatatagccctcataactctcaaatcttaaatatgattatttaaaaactagagtaaaacaaatgtggaggagatttggacttcagggttgttttataaattgccgttttacatttttaaatctagtattataggcaaaattgaatctaaatggttttcttcttttcttttttttactttcatcatcaaaaatggaagaaaggaagaaaaggaggaaggaagaaaagaaggaaaggaagaagggagggagggaagtttttcaaaagcttgtgtcagggatcttgaaaaagaaatgattcattcaaaatatagttgttaatagtaaagatccgtgaataaacagtacattaattcattcaactaatattaatttagcacctattatatgccaggtactgtgctactcactgaggatttagcagggaaagatgtgtccctgtcctcatggaacatataaaaaaggacctttttttcctgagatgcttttactgaagaattgctgcaacctagattatgagttctcatggaccagatggcagttttctgcccatctgggatagttctgaagaatagaccctcgtgtatcaatcaaggtttcttccagttctaagctttcgtgatctatgatctaatagttgaaacaggatgtatgcttccaaaaagatgttatatttgtattacttttataaaaggaaacagagacatgccctattaattcagaagagattgggttcctcctggctgtttaaatcattctatttaaactcctttatctcttctttcttggctcaccttccaaagctcactcttaccccttttagtctcacttccctttcctttctttaattgctgagacaaattgttcatctctaactggctatacatgacatctccagttaaatgtttcactgttaggacaaattcattatgttccaaatgaattcatacatacatatgctatttcttccttttctgattttcatattgccaccagcaatatcttcattctcccagtcttccttactcgaaatccaagagtttatttgcttcttcagatattaatctccaacaccaaattggatagttcttcctcctttcaaaataccttctcatatgtaccttcttttacattgaatacaatacagccttaattctaatgcatatcaacccaagtctagtaagttacaacagcctctttctgatctcagtctcaggtgccctttcgaatctgttttacactatactgatcttcccaaaccctaactttcctctaaaatagtgagtcatgtcacagaaattttcagtggttctctttgcctgcagggtaaatcttgagcctcagagtctgggacgccttgctttgcatcatcggctttcaacatgactaactaattgtatctcactgtcgtcctcaacaccactgttctgcagccccaagcctttcttcagcttgtcactacttcttacctccaaacctttacacttgcagagatcagggactatagcatttgttttttgcctatctctttcaatattaacaaatacttataaaatgaataaaccaccaaggaaagaactgattgtgccagaacataagacacaggtatatcatttctggcttttgcttcctgttttgtatataccacggtatattgatttaacatacagccagttagaaagatctaatgcatggaggctctcgtttaatagattatcaaatttcatttccttgcataattgctcaaagaataaagtgctttgttcctaagtcccaagctaaagctttcgaggactttggttgctttcaagtttttctcattcataaatttgtttctttatttagccagttgtgcattcaatccacacaaaacctttctccagtgataatttgtggaaagaaatattttatgcttaattcttctcgctgtcataccttctcttaagtttgagttatgaagatggaaattcactttgatctcattttaaaatcttgacaatattgaatgtacactggaaactaccactggagcgctccttgtataagaaggcaaaattcttcagagagaagattgggagtctagaatgaactttgatgctgcatcggctcagtccctatgaaactaacattcttactagagaaagtggcctatggcacagtcataatcctttaccatctacatcttccccttgggatttctttctcagtatgtgcaaagatttctgatcagtgtccactcccatatggcatcttcatcttctcctctctacccccaaacactcacatttatctctagattgatttattcatgaaatgacccattctaaatttagaaataatgacatatgcccaacatttatttgcacgcgttttcccacaacctttctctataatcttatggtatcacattcttcaagaccaggaattgaccttgcattgggccataaaatacgttgaacaactgcagtttcatcgatatgcacactagaattggtctgcattcaataaactgattaaagaaattaaaaagccaattacttattaaatatttataaaatactttttttcaactttaatcttcaggatagcagttaagagcaagacccagactgaatgagtttgaatcctagctctgccaatttactaactactgaagcttaggcaagttttttttttttaacctctcatgcctcagtttttatgtcaatgaagtcggggggaataatattaactcctattgcagagttactgtgaagatgaaataacataattcatattgtcatgccacatattgcttaataaacattagccatttttgtattgtatgtggtgccctgcacattatagtctattgctctccttttttgctttttttttttttttttttgagatggagtcttgttctgttacctaggctggagtgtagtgacacgatctcggcgcactgcaacctccacctctcagattcaagtgattctcctgtctcagcttcccgagtagctgggattacagatgcccaccaccacaccaagctaatttttgtatttttagtagagactgcgtttcatcatgttggccagaccggtctcgaactcctgacctcaagtgatccgcctgcctcggcctcccaaagtgctgggattacaggtgtgagtcaccatgcctggcctattcctctccttttattaaccataatagtagcaagaacagtagctggtaacatttattgagcaattaccacgtgacagaaactaggctaaatgctttacattgtatcatcttatttaattcccacaaaaccctataagttatattattttccacattttactgataaggaaagttaagaataatttacccagggacattgattagtcaaggttctccagagaaatagaagcaacaatatacatatgtatgtatgtatgtatatgtgtgtgtgtgtgtgtgtgtatatatgtatgtctatgtgtgtgtgaatatataaaattaagtattatctcatgcagttggagactaagaagtcccatgacctgctatctgcaagctagagagccaggaaaattggtagtgtgatttcagtcccagtctgaaggcctgagaaccaggggagttgatgatgtaaatcccagtgcaagtgcaggagaagactgacatcccagctcaagcaggcctgcagggaaaaaaggaacatgcctttttgttctgtttaggacctcaactgacaggatgatgcccgcccacattggggagggcaatctactgaatccactgaaccaaatgctaatcttgtctgcaaaacaccctcacagacacacccagaaatagtggtttacctgggcaccccatagtccagtcaacttgacacatagaattaaccattacagacctgcagtcagtgcactcagtgtcagtaggcatacttgtttgttccgcatcgcttctcttctcttctctctctctctctctctctctctctcacacacacacacacacacacacacacacacacacacacacgtaccacatttactcatttactcatccatttgtttggtcaactagtcattaaacaaatatttgctaccatatactatgtgcctcctgcagaaagggttggagacattcgaagagaaaggtaaacaaaaaatggtccctgctatcaagaagtttccaatctattgcaagacacactcatgtccatataactaaaatgaattatatgatagaagtgcttcaggtataaaccatatactgttagaatgctgaggaagccattaattctaacctgggagatgaggaagtaaacatataaacactaacagcattgatctgggagagaagtggggtaagagcattgccgagagaaggagcagcatgaagaagccacgcacaagagttatattggatggaatagtgcaggacaggcaggtagttttggtgggcttagcaggtagagtttgggagtgcagggtcataaggttgggaaggtaggtttgatatgtccctcatgcttttgtgtatataaaataaagtaaatcctgcattgtaggggaaccccacttggttatccacgtatttgggccaagcaaaaatgggcaagtctagggagagagtgaaaaaatgagattgttctggatatacactaggcacttaattgatattggaaggccagagttggtttgagaccaggctacctgagccacttttctgatgagattaacatcgatttttacctctcgggaattctgcacaccacgggaactaccccctgagttctgattgctctgtgcaagctctgatcaacccctagtttagcatggactgttcacaactaaatcaaaatccagagttagagagctaggatgcctggagccaccacttatattggattggcaaaatgccaaataagtaagtatagcatgtcacccgtaaaattattcctttcttccccaccaagaatagaactcactaagttgacagcacactgtgtcaatatattatagaaaaacctaataggaagaaaagaatggcagttttcactgcatgccccctaaaggtatatttcttaataatttccaagtccactgaaaactgaattccgaaaattagttttatcttactacccaccctattttatcccaaatttaagccttgcctgtacttctttgatacttaatatttttttctttgaggtggagtttcactctgtcacccaggctggagtacagtggcgtgatctctgctcactgcagcctccctcctgcctcagcctccctaggagctgggactacaggcatgcgccaccacacctgactaatttttgtatttctagtagagacgggttttcaccatgttggccaggctggcctcgaacttatgacctcaagtgatccagccaacttggcctcccaaagtgctgggattacaggcatgagtcactgtgcccagcccataattaaatattaatcaaccactggttaattaataattatcaataattaaatatcactcaatgatttattatctattaatcaatattgcttctttaaaaatttgtcaaaaacaatagcctaagacttaaagacaagacatgtcatttctgagattctgtagtcacctataccaaatgtcaccctccctaatgtttttgtgaaagtaaagatttgtatttttttatggtactaattgaagcagtagttcatttgtggctgccaatgagttgactgtaaaaaaaaaccaaaatctcattttaacattgtcgagagaggaaatcctttgtgtttggccttggattgataaaaacgagtctggaatactatatacggtaagtgaatattaaaactagagttatgaaatgttgctttagtgttctcagtcttggagactcaaagtatcttatcagaaaggatacattgttttaattgttcctcattatatagaatgagagaacatcatttctctccttttcctcccaggtggccgtcgaggaccgagtcaggcagctgcatgaagcccacagggactttggtccagcatctcagcactttctttccagtaagtcattttcagcttttatcacttaactttattgcatcttgattaataagaataacagttgaaaaaacaaaagaattaagagttgaattatagtaatcttttatcagatgcagtagaagcataaatcatcctgaaatataacttggttgataagttgagaaggttaggaagaggaaggccaattggatcattttgtccagtcttcagctaatgcataattgtttcctgcactatattctcaaatgttaaccatattaatatttttgagtctttttgaaaaatgtggaacactttgctcaggagccatgctagtattctctgtatcattattccaatgttagtatatgggctgctgaagcaaaaacatacttttgagtttttaatttctgcctatcagttcagttcataaagctaataattatgatatcatgtaattataatatgatcatccaatatatgttactgtgactctataattctttaaataattcattaaatgatccctgccttatgaaatgagtgacaattctcaaaagaaggcatacaaatggccaacaggtatatgaaaaaatgctcaacatcactaatcaccagggaaatgcaaatcaagaccacatgatatatcgtcttaccccaattagaatggctattattcaaaagacaaaaaataacagattctggtgagaatgtgaagaaagggaactcttttacagtgttgatgaaaatgtaacagtaaattagtaacagtatgaagattctcaacaaactgtaaatagaactaccttaccatctggcaatcccactactggttatccatcccaaagctaagaaatcagtatatcaaaagggtacctgcacttgcatgcttatcacagcactgtttaaaacagcaaagatgtgaaatcaacctaagtgtatatcaacagatgaatggataaagaatatgtggtatctgtacacaatgaaacactgcaagaatgaaaccatgtcattcacagcaacatggatggaactggaggtcattatgttaagtgaaataaccctggcacagaaagacaaaaatcgcatgttcttactcttgtgggagctaaaaaaattgataataaacatagaatagaatgatagatactagtggctgggaaaggtgtgtgggtagagggggagataaagagagggtggttaatgggtacaaacatccagttagatagaaggactacgttatatcatttgacagcagaatagagtgactgtagttaacaacgatgtgttgtatatttcaaagtaccaagaagaaagggcttgaattgttcccaatacatagacaaatgacaaatactcaaagtaatggatgcctcaaataccctgacttgatcattatgcattctatgccagtaaaatatcacattacctcataaatatgtaaaatattatatatcaataataaataaatactatgcctccaagttgaaacctcagcctatgggcatttcctttccctaactgtttgcatccttcctttttttttttttttttttttttttttttttttttgagagggagcctcattctgtcacccaggctgtgagtgcagtggcgtgatcttggctcactgcaacctccgcctcccgggttcaaactattctcctgcctcagcctcccgagtagctgggactacaggtgtacaccaccaggcccagataatttttgtatttttttagtagagacgaggcttcaccacattggtcaggctggtctcgagctcctgacctcaagtgatccactcgccttggcctcccaaagtgctaggattacattcgtgagccttgtattctccttttgttcttgacctctagccattctttttatttactggttttgctattttattaattatgtttttataattaatactaagagaaataaccttggttaactgaaagtttaagtattagaaaatcctatttatacaatattgcatattaaattggcaagcacctgttttcctctgattaatgttaatttataccactttttatttgattataaaagtatatgtgttgagttttttggtatttaaaaagccatactttaccacatggagttaacatctgttagcattctgatgtatttccttgtggtcatatatgagtatatatgagggtttatccatcattttaacgcaattactttgtgcctagaaatgttacagattttaactagtttaatccttatagcaatcccttcaatcccttaaggtaggtaccattattatacccatttcaatgatgaagaaactgaggcacacattcatacagctagtagatgagggagccaggattgaaactcaagaagttggctccagagtctgtgtttttaagcatcgcactgtaattttacttaatttatatattttatagagaggaagtaattctgtatgatctccattcttctgccatattctttcattgccattttctgatcatttcctttcttttccattctccacgggttaataaaaagatccacgctcacaaatactttaaagtatttgagtagatgttgtcatgtgtgtctccagttggctgttgtctttttgaacaaaatttcctggaaggtgttggtcctgtgtttttgtcatacatcgataatagattaagaagaagtatcttattttctggactggctctaactttattatccgcatgtggtctagttatttggacacagtttcacaatgctttggagttgccaagaaaaagggataagttaaagcagtttatctaaatgagtgggatcgtggcttttaggaacggctctagaaaaatgataaaggctacagatttcgtcttctgcatctttccaaatctctggtctacttaacttgccttggtgacagccattctattcgatttaattgagattaaatgtgataacatactcctaagcgactcataaaccataaataaaaaatagtactattatgaatattaattactcctcagacaccaggtatattcattcatattttcttctccctgactccccctctgaattcccatgtcttacccattaaaacctattttcagaaaatgatatactcatttaacccaagtgataggtaaagtttaatgtgtacttctcctgggttatttgcattttattagtgtgaaaatccataagcctgaggtggtagaacatcggccataagctctgagctgtgaggaaggaactttgaggggccaaggggagcattctcacacctttcaaaccatatcacatcagtgcccacttccagaaaggtcaggcctgttagacacaggtattcataaagagactgatctacctgcctgaatggagccagccccggaagtcatcagtctcttggatgcccatgtggaatatcaatatacgcttaaaagctttgcttgcaggtataaagaaaataccaacttggtttaagggatatttaagaaataggacggtgagactaaggatggattgtttctttacattgtactttttaaaattacaaaggtactctatacacatcaagaaaaatttggaaagcccacagtacaaacaagaaaagaaaaagtatccataatcctatgactcagagataatcactatcagaaatttggtttatatactttctgtatttctcttgtggttgcgtgtgtgtgtgtgtgtgtgtatcaaggttctatcttttatttttttatttttttgttttttgagacagagtgcaatctcagctcactgcaacctcccccgtcctgggttctagcgattctcatgactcagcctcccgagtagctgggattacaggaatacgccaccacgcttggctaattttttgtatttttagtagagacggggtttcactatgttggccaggctggtctcgaacttgtggcctcaagtaatccacccactgaggcctcccaaagtgttgagattacaggcatgagccaccacgcccggcctctctcttttcttttaaaccatgcgcagataaaaacatgctacagttttatgagctgcttttttcccttaaaactatctttccaatattttcgtgtgtttaaatattcttcttcagagtaatttttctaatgactggctaatactctcttctgtggctgtaccaaatttaccaacacaattctaaattgctcaatataaagattatttcacaatctttattatatcgagcattatggctaatatcctttttatacctttacaaatatctcagattctttctacaggataaatgcctaaaggtggaattgtcatgttaaagaatgtttacattcgtaagccttttcaagtgtattgccaaacttacctctagaaaattgcaccagaaattgggtgtgccatccaaaccgtatttgagctaggcatggtgtggctcatgcctataatcccaattctttgggaaactgaggcaggaggatcacttgagcccaagaggtcaaggctgcagtgatccataatccacccccccccgcactccaatctgtgtgacagagcaagaccctgaccctaaatttaaaaaaaaaaaaaaaatcaccatatttgaagcaggacatctctgaagtcacgtatttgctactataaaagcagcttccccccaccaatgaataaaaatatgttttaaatattcctctaaggtcatattaaatgaatttgaattgatacttttttttagacaggcctgagttgatacatgtttagtaatgtgctttcaggttactataaataataatagggtggctcctaaagcttagaaattacaaagaaaagaaaaataaggaggaactactaattgcacccgccagcgtaaacatgcttactgtctctgtttatcttattctctctctctctctgtctcgcacgtgtgtgcactctctctctctctctctctcacacacacacacacacacacacacacacacacacactcccctttggaaattatttggaaattacattaccagctgtctgttgtttatcagaagacagaggcagccttttactaaaaaaaagaattcactgtttcttcctggtggcccaatctctacatgttaaagaaattttttcttttatcttagatctaagagaaaatgagaagagaaaagcattgtgaaatatgacccttctccgctgatagacactaacttgtccttacttctagttttaatacactgctactcctaattgacttctacaacttaaaccaagaaaaaggagaaattctaatagtgtgacttcaaatatgtatataatttacaataaaattatcatttaaattatttaaattatatactaatttatagttatatatgtataattggtaggtatattgtcagtctcttcatatgtctgtgattaagaaagtactaaagtattcattggttggcatagtagtctgaaaattgtccttttcttttgaagagtttaaagatttgttgggcgtggtggctcacacctgtaatcccatcactttgggaggctgaggtgggcagatcacttgaggtcaggagttcaagaccagcctggccaacctggtgaaacccccatctgtactaaaaatacaaaaattagctgggcgtggtggcactcgcctgtaatcccagctgcttaggaggctgaggcaggagaatggcttgaaccctggaggtggaggttgcagtgagctgagatcatgccactgcagtccagcctgggtgatagagagagactctgtctcaaaaaaagaatttaaagatttttcctgaccattatttcaattctctggtcttctgttctaaattctacttttctcaccaagaaagatcactatatatttgggtaaagggagaaatcattctataacagtaaaaagaatccatggttttcttaatattttacaagttccagaggtcccttaaaagaatattttccaagccaggttctttaaaacattaatgttatattaggttttgataactgtcccttgaaaaaaatagtactgattaataagattggaaaaacactaggtttcaaagataagcaagtttatttcttgttagaattcttggaatttttattatacactgagactctaagaggataaggagtctatagttctccagttttaggtgactgtggaagcctttttcaggcacaccagttaatttcacactaaactttatgccatggatcacagtgaatctttgccttaatgtggtatttgccagatgctttaatgacaaaaaatttctgctaaaggttgtagaaacgtgatccaattaaaaagaaaatgagtatttatgaggcaaaagggtcaagtccctctctttactgaagttcccagccccactcccacccaggagccctcttgtgctgtggagtttcctaactggagataagcttagaaagtatctataccagtagtttccaaactctgaggtgtggctcattagcaaatcctaaaatcagtttaatgacttacaaccaacaatttttgactggtatggaatggaatggaatggaacagattagaaaatatcagagtgcattacctaagcaaggttaagtgttgttttggcggtggttaatttgttagatatgtgtgtacatgcgtgtgtgtgtgtgtgtgtgtgtgtgtgtgcgcgcgcgcacgcacgcgcgcacgccagatcacagtgtaaaacgtttttcttctgtgggttgcagtcgaaatagtttgagaaacattgaatcattcgagccctttccttattttacagataatgaaataggtgcagaacgatcaaatgacataaccaaggtcacaaagatagttataatactgggactggaacccagtttctggacatccaagccacacatcacactgccttacccgttaagaagaaatgcccaggccaataactgtctagtctatctgctattgccaacgattattctctcgtatattcctcttcgtttggccatcctaagttgatttacataacctaaatttttctctcaacacctctgggctaaaaactgccttatcaaaatggtatcgatagcggttaagagtaaaagctgtaaaatgaaactgactgggttcaaatattgactcagacactttatgcttttttctttctctttattcttcatctttaaaatagggataatagtaacatatttggtcaattgtaagacacacttttccacccacgtttcaacagttctgaaatcagaatgcaccatacgaccaatgggatattgaattcggtgaaatatggctgtattatttcatagggttacagtgaagatcaaacagttaatatttgtaaaacccttagagtagtgcctggaacatagtaagtgctattcaagtgtttgctattagctttagcattagtatcattattactatcagcttgatagtataacttaatgcatgcctgttagagtcaaactagtcatgaaagtttcattcattctcttgcatttaatggtcagtataagtagttcctctcctttctgaagatgatttccaaggatctaatctgaaagtccagtgttttgcacattagaacggctcaatagttgtttgtataactaacgagtgataaataatcaaaaagatagaccttaatctctaaaatgtcaggatagtattagtcttgttgacagttatattctacagtacctaatgtggtatgtggtacttggtagatgttcagtaaatatttacagaatgaattatgtcttatacccaaaagaagaagaggtaaattcactcttgacattgataatacacagaggcatgagatttagcatagtggctatcacatagtagacactcaataaataatgtgaccttttctgttgcttctcagcaaagactaatagcattcataactttatatggtcgtttttatcaaagtcgactgtaccatgtaatacattaagggaaaaggctgacttcaaaattacagcatgatcacaactatattacaaaataaaataaaaataacagaaatgtacacataaaggaaaaatggaaaataaaaagataccaaaagacaaacagttattgcatcatttctttctttttacttttacaaattttctggtaatagcatgtactacctttgtaatggaaaaaaaacaataaaggtaacattttatactccagcttttaaccagtgacctcttgcagtggcaatgggactctgaaagacaaatttcctttttactatttattctgaatttaaaagctgtttcattgagtgaccttctcagattatgagacactgtaaaaagaaataactgatccattatttcttgcaggctttacaatcttaactgccttaatcatatccctggttaagtctttttctctcttgtcaaagtgactcaagcttttacagtttctccttgatacatagggcctagcagtttgtttctatcttgagagttgccaagctttcatcctggacattccccactacacatacacacttaattttaaaaaataggggaaacctttaagcacatctaataattgctgacatttcacttaacagtgctccaacctatgctaccagtgtcctcaggggacagacaatttgaaatatgagtggggcaataatttaaagcttcagattggcttaaataagccatcatgaggccgggtgcggtggctcacgccagtaatcccagcactttgggaggccgaggcgggcagatcacctgaggtcaggagttcaagaccagcctgaccaacatggagaaaccctgtctctactaaaaatacaaaattagctgggcgtggtggcatgcatctgtaatcccagctactcgagaggctgaggcaggagaatcacttgaacccaggaggcagaggttgcagtgagccgagattgcgccattgcactccagcctgggcaacaagagtgaaactgcatctcaaaaaaataaaaacatcaaaataagccatcatgataaaagtcagaaagaattttgcaggtccaatgtgagatgatttgcaggctaaaattctctttcaagtaaaatctcagggtgaaatgatttgagccagtttcttcagcagtcacatgttgtcccaagtgttaggaatttgggacaaatgccatgtgacctaccagtgatgctgataatgcccctataaattcaaagacagcctttccaatgcccataaaaagcagctacagcagtaataattatattctcttcttaaaatgtgttgtcatggcccttttctcctttagctcaaatgtatactccccaataagctctcagatttatttgctttacagtatcattagcaaccagattttgcatcgttggccctatatatcccatcaatttgaacacatgaggaaacagaacgtttttgtttctgctatgggaatttctgtgctggggctggcttacaatggctcaagagagccaattgtaaaatatacaggaattgtgagctagttattaagcctacctttggtagcttgaaatcaggcatagtgggaagatttactccatggaaattggcaaatactacaaattggggcactttgttttttttttttttttttttttgtgcatagatggtttcccagaaatgactaatttatctatgttatttggatcactcaagtccctgtaggcaaagaatcttcataaacttagcaggaaggatgctcaggatccaaatatttatgtgcgttgcagagtgaccactcatcctggtttgtctgggactttcccggatttagcactggaattcccattttccaggaaatctctgtagtcccaggcaaaccaagatagttgctcaccctagccttaggtaaaatccctagaagtagagccctatttagatagatggggcttcttgtagaagtaatttgttcaggtgaaagggagtgagggaagcaggataaagtaagaaggatgctggtcaaggagttaagtgggaaggaagagactcacttcagcttgatcccacagggagctctggagaacaaattgtccctactttgagataaggggcctgggctttttgtttgtttgttttgagatggagtcttgttctgtcacccaaactggagtgcaatggcgtgatcttggctcactgcaacctccgcctcccaggttcaagctattctcctgcctcagcctcccgagtagctgggactaccgcgcctggatttttttttttttttttttttttgtatttttactagagacggggtttcactaggttggccaggctggtctcgaactcctgatctcctgatccgcctgcctcggtctccaaaagtgctgggattacaggcgtgagccaccgcgcccagccagggctgggcttttattttcccgtgtgaattagtcattggctgtggatttctggggagtaggagatagcaaagcagttcccatttggccaagggaggatttctggtgaaaggaccaatgaggccttagcaaccaacactcacaacaactgcggctgggtgaaccagctcagtaaaagggatctgagtggaacaacaatagtattaacctctcctagactttatgaagctgctatcataccccatgcataatctggctttagagctgaatgggcgcatttagctggatcactaaccaccactccttcgtcacggacttacatggaaattagcccggtggcatggaagagatgagacaaatgtctgtttctttcttatttcatcttcctcattgtgacagattcttctgggcctcatgaggagctagggccaagagaccagcaccagagttctgaatcagttttataacatgggcactattttggtggaatgctggctctgaagggtgtatttttacactacccagaaaatgaaggcatttgtgaatttggcctggggtagcattttgtcatctgtccaaaatacaaagctttgcacaacagaaatagtgggatcacatccctgtgggcaagaatcattactttcgtttttccatttggatgttttccattttcagaacacaaccagtttgggattacaaagtactttctggtgagaactttgaagtgaggacaaaaggcattttgttctttagtagacttacataaactgttcctggtttaaaaaccattctagatttttaaatagactttcagatatctgcagtaaaaatcatcttgatttcaggcgactgcaggtactgctctgttatgtgctatgtctccttaaggctgtaagggacagggataggcttaggtgataaggaacattttcaggatacagagaggcatgaagaataacatgggccgggcgcggtggctcacacctataatcccagcactttgggaggctgaggcgggcggatcacgaggtcaggagttggagaccaacctggccaacatggtgaaaccctgtctctactaaagacacaaaaaattagccaggcatggtggcgcacacctgtaatcccagctactcaggaggctgaggcaggagaatcgcttgaacccaggagacggaggttgcagtgagccaagatcacaccattgcacaccagcctaggcaacagggcgagactccatctcaaaaaaaaaaaaaaagaaagaaagaaaagaataacatggaacaacagacaccacgaaacatgtttgcttctttctgtatatgcatttgctgccatagacttcagactattacagtatcatatcttctctcttctctccacctaacaccttctacttatagtttctactttcttatgacttccattttcttcctttgttatccgactttttaaacttccccacccatctgtcatctctgtttatctctgtgtattacattcaagctctccaagacaaagcatctgattggattagttatttattatccatctaagggtaatgccatctcacaggccacaggccagactgtaaactaggctttcttgacctgggcactattggcatttggggccagataattagtggaatgctggctctgaaaagtgtatttttacactactcagaaaatgaaggcatttgtgagtttggcctggggtagcattttgtcatctgtcctagaatacaaagctttgcgcaacagaaatggtgggatcacacctctgtgggcaaaaattattgggggctgtcctgtgcattatctctggcctctactcactacatgccagtagcactcccctcccttagctgtgacaaccaaaaatgtctccagacattgtctgtctgatgtcccctgttgggtgaaattgcccctagttgagaatcactcctttataccaatgcctgcacaatttgtggtaatgaaagtcatgtggaacactaaatacagtgacctatgcctgaggaattatttgaagttgcttttctgcatccttagggaccctttagtctctcgatgaaagggagtgtcctcagcagacaatcttcaggaattgcatcagctgcctcacccaagatcataccccttacaggggcagctcttcctgatcagtgtaggggaataatgacctggccattttggcccaactcaggagaacattaacattctagctcaagagctcccatggggttgaatgagactgtcactgggtctgcattcaccttgacttctccctatttctattcctgtttctttcacttcccttccacagttgtctatcctgctctctaatcattgccttagagttggcttcctggaggaagccaatctgtgagggggcaatgaaattgacaggcatttagaagcatctaagaaaaaggtattataataggcccattacagtcactgggtaatttgatttactcttgctttcataatgaggttgattattttgttcaggataagtagtgattattattatttaaggtgtccaacctcatgatctccattaataggtaaggactttggggacagcataaaattacatgaatctcttaccttaaaccttaagctcagcagcatacatgcccatgacaggcaagagttagaacgtaagatggtcagtaacatagatcttgaaaggaaatatgttggagtgtgagcactttaagggcatagggcctgcattacttttttattaaaaataattttgcatctaacacaacatcttgcatattagatgcaggatatgccttgattgaatgaataactgggcacttaaaagattgttcccagtctaataaaatgaaagaacttagcctggtgcttagtctaatgtccagaaagagttaatgaacttcactttatcttcagtcagttaagaattgattcactttgttactcaacaaatgtctgttgaatgaccaatgtaaatcaaactctgatctaggaactggggaaacggcagtaaataaaacaaagtttatttattgtggagcttacattttaacaagagaagatggacaatcaggtcatgataagtttgatttaaaaacaaagaataaagcaggctaaaggggctagaggatgggagaaggggacccttttagtggagtggtcaggaatggtgacatttcagtagagatgtgaggaagtacaccagtcagatattgggggacaaagtgttccaggtggaggaaacagtaaaagtaaaggatccaagatggagcatgcttagagggtttgagaaatattaatagcaaggaagccagtatgactgaagccaaggaagaaagatggtgaatgataggaggtcagtgagtgaccaagggccagacgaggaagggtcttatcaactatggttggctatcgttaaaagcctttggcatatatgctttgtgagaagggaagtcatagaattctgagctaagaagtgacatggtgcctgtagcattgttacttactgtgcctgtagtattcattcattcattcctatatttattaacaaaaacgagtcacctgaaatatgaagataaaaagagaattattgccttgggacatttaaataccaatcacaaaagacagacctataaaaaatgacctcctacagtggtagtaaatagtgggtgcaatgggagtagaatggaagggaggaatccattccacagtgagagaaaggagatgttctatctagttgagtattaacgcatattgtccctgaggctacatgcaaatccaaagtagagggtattccttttgataggaacttagcaaagaatgtttataattgcttggtccctgatctcacctagcaagagtcacaagatgcattcagtgatgaaaaatcagtttctcccttctacttagccattctgataagatgaatatctcgggccgggcgcggtggctcacgcctgtgatcccagcactttgggaggccaaggtgggtggatcacctgaggtcaggagttcaagaccagcctgaccaacatggtgaaaccccgtctctactgaaaaatacaaaagttagctgggcatggtgacaggcacctgtaatcccagctacttgggaggctgaggcaggagaattgcttgaacccaggaggcggaggttgcagtgagccgagatcgcgccattgcgctccagcctgggtgacggagcaagactctgtatccaaaaaaaaaaaaaaagatgaatatctccctttccagtttcgtgtgtagtctccttaccgcccttctgttcagaaaagggatttcttacgtatgtataatgaatataaatataggttttagagagcactaatgttttaatgagatagaaataggcagacgagagagaataattgaaggattagtcaacatgagggcaatttgatagggaaagaaaaagtctgagcaggaaatgtctgtggaaaaaaaaaatcgaagaggaatggaatgaaatgagctcatttatggtgtgagttagggacagaagggatttattctcaggaggtgaaaagtgaaggagttcatgttatagaattcgacctagaccagctatcaagggaaagaaagtaattcaaaagacttggtccaggagatctggagcagatacatctattagaggaagattcagttttgaactgcatcttcagttattcctggaacccaacacaaaagctcatgacaaccttgttatcttcaggcaaaaaaaaaaaaaaaaaaaaaaaaaaggcgggggcagcaaggcttatgtcttaaacaagacagcacataacttcaggtcagagaattccattaacatgaatcacccacaccaatttaaataggaaaaaaaatagtaagcttggttatgtaaaaatttagtttaaaaatcagaaccaacaattgaaattaaacaagaatgttttatttatttctaaaaatatttagctatttattttgaattctgaagcaatactaatatagtatataatgataaaacacagttgattttcatagtaaacatcagcatcagaatgccaagaggaagatttgtctccgttcatgttttattactctgagaaccgcgtaacattttttaaagagtcagaaaatggctagaaaaagaggaagaaagattatttccttaactagttccctggtcccatgctttggtggttaacagtcagtttaactctagaaccatggaaagtctctgtcactttcctggttaccctgggattcctcacattggcagtaagttcgtgaatgagataaatatcctgataactagctacattaatgatgaaaataattataaacgtaggagttggaatttttaaaaagtatcgagcgctctgtgctcttaacacagaggaagcattttgcatagattaacccgtttaatcctcacaccaacctttaaaataaggactgttattgtctccatttcacagaagagaaaactgagactagaacaatttactaacatattcaagttcatacttgtaactattatggattatcagccttagaaaaggggttccagacaccagtgaatagcaacccacacgtctcaactgcacagaccaaagaggatgataatccccattaatctttgcatgttagtagaggcagtggctagtaacaaatgggagagactttggctggaggatattttttattctttaatctttatgatactgtttcccctctccccttctctctctactcctctctctgtcagctgtatccacaataatgccacaatataactactatacaagaatataaagcttctgttctcatgcttatgggtctacaggtcaactgtaattcgggtgatctggataaaacttgactggaaagctctacttcatactgaagcatgcctgggttcgcctctaggctgtgagttcagtttagatggtttctaaatgtgttgggttgtgagccccagactaaaggatcagaagcaacctggggcatgttctcatggcagattgccagtgtgacaagcctctgttcacatcatatctgctaaagcaagtcacatggtcaagcaagccaaggtcaaggagctaggaagcacactgcgctcaccatgaggccatggctaaggtatacatgtttagttctttcacaactgagtgaaaaatgggccccaaattcaatctctcctatactctttttgcgttaattgctagttctttctcactcttctcgctttctaatggatgtacatcccatctatgatcatttggtttttaatatctgagttgctccctactgtctcaggtttcaaattttactttccttgaaatttccctggtgcctaatacaatacctttcacacagagagcgttcagcaaatggtgtggactgcctgtcgtcttttaaaagtacatctgcagagacagtaaaggcacctggcgatattgcattgacttgttagtaacctgacttaacccagatggcccaaagactgtaaccaccattacctggaggaaagttccctggtaatgcagtcagccaattatgttcgaatttactcgaaaattccttgagcataaattattcatggctctatttatgtaggtatctatcttcctatatctgaccttaggaagcttgattgctttcttactcttctaataatcaccgtgatgtttttgaagttttctataagtcggttagaagcagcttttttttctttttttttttcatgagtaatgccgcccaactttggctattagactttgtgtgactgtgcagccatcagcactggatattagatatagttttatctctgcaactcagtcaccttgccaagaattttagtatgaactcttgacttcccagatcaaatgtgagcctgatactctaaatgacttggcaatctactgacaaatcccatggtgtggtattctgttcaccatgtgcaatggtctcagagctcagcattatctgtctgacagctcatataatatttacaggttgttattcgttaggaattttagttagccataaagattttcacagctatggcagacattagaggtctcattcatcactcttgtgaccttcctctctggaatgtagcccatctgtctctgctgttgaaatctttatggaaagtctgcccatctttgaaagtttagtaagtgatcttaaagttttcattgaatctttacttttgatatacgatatagacatataaagcactatccttattttaatttaacgttttgaaaagtgttaaatttaacttggcctttcatttaaatgacagaaaacttactcttgctacaggaactatatgcgtcacatcaaaagaaaatagaaatcatacagaaaaaaattggaatgggaaaaattacacatatatacatatatattcaacactaataactacatgaaagcttaaatactgtattataatcctgattatgactttaggaaatgaaaacgatagaaatacattttgcatataatttaacgttataaagaaaccctaagcaaattcagtaatgaagtgaactgaataggctgggttacagagcacaagagagggatgaccaacaatcagatgttgcccctttccatttctgttttcctctttttatacacaacttctcaaatgcttgcttcccctccgtctactccctccttcagcctctgatcactagtgtgaaattgcccttttgaggtcaccagtgatcgtgggatcaaatacatcttcttcttctacacccttagtctgtcaggctcaagaattgcttatacttcaccagctaggctgttcttgtgtttcatcccactttattctagcttctgtattatttttctttgacagcagttctactgccaccgccatttgggggcatttgccagggtacattcccttttgttttcctccactgtactcatctttttttttttttgtacttttatagctttcttggggtataattatatgcaaaaatatgcatatttaatatatgtaatttggtaagtttggacatatgtatacacccaagatactattgccacagtcaaactaaagataacgaacatattcattacctacaaaagttttgtgtccctttgcttttgtgtgtgtctgtgcatggcaagaacacaacatgagatggaccctcttttttttttttttttttttttttttttttgagatggaatcttgctctgtcgccaggctggagtgcagtggcacgatctcagctgactgcaacctccacctcccaggttcaagcgattctcctgcctcagcctcccgagtagctgggactataggtgcgcgccacctcgcccagctaatttttgtatttttagtagagatggggtttcaccacatcggccaggatggtctcgatctcttgacctcgtgatctgctcaccttggcctcccaaagtgctgggattacaggggtgagccaccgcgcccggccgaggtggaccctcttaatccccttaagttttaagtgcactacacagtattgttaactataggcactatgttgtacagcagatctctagaacttactcatcttgcataagtgaaactttatactcattgaataacaatttctcgtttcccctgccctgtcttctggcaaccacttttctatttactgcttctatgaggttgactatttcagacacttcataaaagtggagtcatacagcatttatccttctatgactggcttatttcactgagcatgtctgcaaggcccatccacattgtcaccaatggtaggaaccttcttttttttaatgctgaatggtattccattgtatgaaaatgtggtgtatacatgcagttctctttgtacgatcttccttccttaaagagtccagccattctcatagcatctgctatgattctagtacttatggtcttgtcctttcacttgcatttcagtgaaaagaaccaaacttatgctgatgcaaatacctgtacacaaatgttgataccagctttattcatgattgccaaatgctaatcagtctatgggcctctgattttcactgcataaaatatagactaatctgtttatcattcatgctgatgaatggtggataaatggtctagctaagaatgaaagatctgttgtatagatgtcattggtctaggaagacagagatgtagaaagaagtaccataagcccaggcagttagatactattcaaaggcatttctctctgccatactttatactacatgtggcacattaacagtagttaggagtggattcaaggctgcagataaatgctgcccaggtgagagagaaagaattggttccacaattaaccatcattcagacaacacatcatagctatgtgattacaaacattatttgtgtggtgattaacattttacaaagcaatttcatattgatttcctcattttatcctgacaacattttggtgagggagatatcattattcccattggaatataaggaaaataaggcttaggcaggaaaaagactagcttaagatcatgaagtgataggggagtcaggactcaaatccagttcttctgaatctgtactctggacattttctgctatatccagctccctctcaagatgctggattgggctttgaaatagaaagccaacatcctgagtgcctttctaaactctgagttttacagtctatcaggggaagaggagagtgtgagaggaatgttcccaaataatctactgtatcaagcagtatatctaacttgctttgagaattatgccaactaaatactattgacctgcagaaaattgatttttctctttacacttatatcaataaagagaggcttctgctgccataagtgtaatttatgtaaaatgtttttaaaacattcatagcctttaatcaagtaaatatacttctaggaattttgctttaaaaaagtaactaaaatatgtgcaaagatttatctacaaagatgttcactgtggccttacttagaacagtgaaaaactggagacaacttatatgttcccaaagagggaatttattcaataaatcatggtacatccataagtgggaattttttagcaatgaaaaatctgttgtaaccctacaagcccactcttaagcattcatcttagagaaatgaaaacttatgcttatgcaaacacctgtacacaaatgttgataccagctttattcatgattgccaaatgctaaaagcaacctaatgtctttgaacaggtgaatggataactaagctgtagtacacccatataatggcatactacttagcaatgaaaagaaacaaatcgttgatacagcaatatggattatgcattatgctgagtgaaataaaccagtatcaaaaggttacatactgtatttatatgacattctggaaaagacaaaacaagtctagtagatcctccctaatgccttttgttcaaccccagaggtgagttttctattttacctccagtgattgctgtatcggttatttatctaaactgtccccacttttttgacccacctatgttatcaaactccaaatccaccaagtatgagaaaagtagagagatgaatgaaggtatttgtgttggaattccagaaagtgctcttttggcatgtcttaaaataacattagcattctttttaattttctggttaggcccctatgttgattaaaatatgacttaacaccagggtgcatcacttggaacattctgttcatcatgcatttaaaaacggctgaaataacaacttcccctaaataatgtggcctgtgcttgtgattttcaaaactaccttgggcacaatattgaatcctgtcacctcaaggaaggaaaagcatttgaagatagaattgctaccctttcttgctcttaataacatactgtgtctgtaacacaaaaggaaattcagaggttggttttgcaataaataaatgcatgtgtagtttgctatctaaattcagtggacaataccccatgatgctggtgccgtatgataatggttgatttgtacattcaagaatctgaatcacaaagctgccctggaattacacgtagtggttataagcacatctgtataagaaaataccaaaggacaacccggtgtcatatagaaactatttgccgataaatttgcttttgatgggctactaaaaatggacacatcaggcataaaagatgtgtgtgtctattacgtaggctagctttatgaagaatgacaagcttccactggtacactgagataagaaacagctgttgttggcatcagtactgctacaagaaatgaaaaaattctgtggcacacttgtgagcactgccacatatttgatcaacttttgaatagatggaagaccagaatcatctggcagccccaaatgaaattgtcgacaacccttaagaatctcttgagaaggagcactgaacccaattccgtagaactatcatccaattgtgtgttatttctaaagcaagtagttccagtgtgtgtgtatgtgattatgatggggcagggaaggaatgaggggaggctgttgttattttcctttttttttttttttttattgtgtcaaggacatttttgagcataaaattgtaaggtttcaaacaatgactgcaaagcagttgcttaggtgaatttataaactgtgaatcaaaggggaaaaacatctttcagaaaaaaaatacactgaatctcaccattggacctatttgatggctacacataagacaaaaagcttttttaaggaaaataaatgaacacttaagaactgcaattacaaaagcttgaaatttcatattgatctagaatttataatatttttaaaattctttaaaaatattttcagctatttagttcaagcatattctgataacttctctgacatttaattgaaaattttccccttttaatgtaaacataaaaagtcaactctagataccctacgtaggtcttcccattagctcagccaggcaacgccaattttcctctgtctctcgctgcttagaggttgtttctttcaggccgaaagcccctaagccaggccaggcagccagcagccctctccagcacacttctttctgagagacgcctaagaatagtgtaggaaatccaaagtgattcttctgctatcagaggatggtctagcatcctccaaattagaaagaatttctggaccactagaatgataaaaaaaaaaaaaaactagaaaggtataataagagaaattgtgaggcctcagcccatagatacctttaaggaaagaatagccattcttttctcagtttaggtattcacaggcttggcattcacagccagtgagggctggaccaagagctctctggagttctcttcttccttttatgatgctggtattttaagaagaaggtacactgagcagccaggagctataatttctggctctccaccatgtttcctgctatagagggctagctttttaatatttccataacaacagactctgaccagataggtcaggaagtctagcccatggtttgtttgtttgtttgtttgtttttcagttggagttttgctcttgtcgcccaggctggagtgcagtggtgcgatttcagctcactgcatcctttgcctcctgggttcaagtgattttcctgcctcagtctcccgagtagctgggattacaggcacctgccaccatgcccggctttttttttttttttttttttggtatttttagtagagatagcgtttcctcatgttggccaggctggtcttgaactcctgaactcagatgatctgcctgcctcagcctcccaaagtgttgggattacaggcgtgagccaccacgcctggccttagcccatgtttttaaatcagatcttatttactctgtgaacttatttggacaggagagctgcatcctacagaagaaaaaaggacaagagaagagttgggaagagaatgagaaaggcaaagatggaaagggaagcagggaaggcaggaggaagggaaaagaaaggaatagagaaagaaggacagaaagaaatggaaagtcagagactacttcaaaacagcagctaaatgtcttttttctctgtattaaaaatttccgtctgccaaaatgaaaaagcataattaccggccaaatacaaatccatttcctatatcgtttaaatgacatatctccaaggtacaaaacagcatgtctggttaaaggttgggtgatttgatccctctattactctatataaaacaaagaagctggagtttcattacgcttaaattgtctggcagtgggtgaagttaacttttattagaagctgttctttcatattatacagtgtagtcgaggatatattagctttgacgttttcttacatctcaatacactgcggagtgaatttactgtgagactaatttaaaagggagtttttcataggaggaaataatggtcagcatcagctgtgcttcaaattattagcagaatgaaaattcaggggaaaaagtatagacacataaagttgctagatattaataagaatgcgtcttttatttctgtttctgataatattctgtgtttcttaaagctccagtgtcttaaaactatattcaggaggaagattatattgttgaggaaatgttatagtgcctcctcaacaagattattttgtcttaaagaaagaaaaaaaaccatcagatcaaacagtatataaaatatatttgtagaggttcagctttagggaagaaatcctacaacttaagcctgaaaaaaaaaaaaacaatgcaaagatcattcatttgaccaatacacagtgaagtcataataaaacaaattcctagtatgtgaaatgaaatttcacgtataggattcatcactcataacaaaagtcttattacgctctgatatcagtagacattccctcacttttggtcaccttttctaataagatcacactggtcagctgacattttgaggcaccaaattaagcatctatttggtaagtgaatttggattctctttaaaccaataaagataaaaacaaccatatcagagtgataagcatattactttagcttcaataacttagaatgtaaatatatcacagagggatatttcagctactgaaataataaaatccagtcagtcaaatagtaaaaaatattgagaaccagcaacaggaagtattataaaaaaaagcactcaagggagacacatacaagaaaccccgtcagtctactcattcagtttcttatctgttctataggtttagcagtggaaatgtttgtgggttttttttttcttcgcatttatctttgtgcctgaatgagttcagtttcgcttagattaggacagaaatttcagaacagcaggttaatccatcctgtcttcatgggcagctgagcaaacagaccaatatcagtgtaaaattgtaattctggagattaatgttgtctttcctgtttgcgatgaatttgacctccttgcctttctttttttcctcccttcttttcagcgtctgtccagggtccctgggagagagccatctcgccaaacaaagtgccctactatatcaagtaagttggaagtatcacatttttaaaagagcatttattgtgactaacctgtatattcacaagtgagtttatttttaaaatgcgacattagcctggcctacaatacctgtgtcttttttttcctgaggaagcttggataaaaaacttattctaaaattaccattgtaaatttgctgatgcaatggggaacgacttttaagaaaagtttatttaatgcaggatatatggtgtgttttgtgacagagggggcggatttttcacaatagaaccaaaagctccagataattttattgatagtgggagtcaatctttgcgagaacaatttcttttatttaggggttttctcacatttcttcttccgtcaaagatagaagatttccgcagttatatgtacacaactgttttgggtgaatgaatactacatgtttccaaaaggcagaaagcagcagtcctcgactcgtagggcttagttgttcattcttgatacataacactcagtatttgtcacctaacaacagaaagatactgttttctggaaacatttgtgccagtcaaaagaatacgagtgcttggaagcaccttctgtagtattttgcatgaaatataaatgacaatacattgggtcaacgtggaagagagaggagagaggatattgagtgattacgataccttcacagtctctcatccattgtgcactagagtctaacttaaatttaactttgaattggaaacctcaacaacaattacaatttactgggttcataaaatagtcctcgataccaaccgaagtctttgaacttgcttctgccatgagtctgactaaaaatattagatgttttcccatttttttccgcctgccatcttttatcgaatctgtttttattctttcactgtccatcaattcttcttaattcggttctaaagcaataacagcagtcctagatcttcattactacagtcctcaagaaatttgattttatgcctctattttgttaactcagaaaaatgggagtgaaggtagtcttttgactctttcaggagaaatacatactttaggaaacggtttaccatttgtcttattacatttttccagatgaggtatctcttaacttgaaaattcttttttagtatgtttgattctgctttttagttttcatattttatgaatttaattttattattgttatatttaattcattagtcactcaaaactgtacattttaaatacctatttaaatcacatgctttattaaataatatattgctgtagacatgcactgtatattaccttacatccactgtatattttatggaacaattttcttcaaactctagacagtgatttcctacatcagtgtctttgtcctcacaaatttttatttccgactaagatgtttgagacctgctacttcttcaaccaattcataaagctctcacttttatccaattcctttatgagctgaaataaagactctttttctcctttcatagatgaggttttaggatcactggagaattcaagacacctttaagctattattctccaaatgactacttgtttggggctcactagaggtctcacatggattgctagggtctccccggtcccattgtcctttccctatatattcatcttctccctgatgttacttctactacaagagatcccagtacattgctgtgagggaatggaaatgaactccgtccaaaaaataataaagagacaaattccagaaaagctgtaattcccttctgtgtattagtctcttgctgtttctcagtggaattagagagcagctacatatcctatttgtccaatgctccttcatgtacctaaagaccatggtgatggtattgataagggcacagatctatgaataagaaaacttcaattttagtcctccagtctagtcttagaggctctgtcattaggcgactgtatggctttaggcaagtcacttaacctataaaaatcttggtttctttctttttttttttttttttttttttttttgagatggagtttcactctgttgcccaggctggagtgcagtggcccgatctcggctcactgcaacccctgcctcccgggttcaagcaattctttcgtcttagctcccgagtagctgagactacaggcacctgccaccatgcttggctaatttttgtatttttagtagagacgaggtttcaccatattggtcaggctcgtctcgaactcctgacctcaggtgatccacccgcctcggcctcccaaagtgctgggattacaggcttgagccaccatgcccagccaaaccttggtttctaatttataaaataaagagttggactagatgatatctaagatcctttttagctctaagacgtaatgagcatgactcattcagttgtcctgtccaaacttaaaaaccgaagatctcagcttttgttcgataatatctttatttttaaaattcattattttaatgaacataatgtaaattcttactttaaaaaacaggaattttatttttccactgtttaattagctttagatatgccctatcaacccactccaatttcaccacacacctctttaaagagctcaaatcttggtatataatttaggattattatgcttcctggctcatgataagagagagagaacaataggcaggaaaatttgccaaaaggtgagtatggagaccttaaaagcctctgaaataatcagttccttgaaatgaggaaattacgtaatttctcaaaaatatctctgaaaccttatggagagcaattctctctacaattataatctctttgaaattagggatggtataatttctcaaatatgagtgtaaaatgttaaactgtaatatagggaaaacatacatgtttataaaatgaacattgtcagtaagcagatgattaatggcacttgtgtcttattagccattactattatctaaaatgttctatggaaaccaaattaatttgatgtacaaggttcggtggactttatgcacagcttaatgccgttcataatctgagatgccgtcttggtctaaaaagaacaaaaatacgtttacagtgacagtgcttcaaccagtcctcatttttcctcttttttatcttgtttgtcttgacttccagtcaagagtttttaccacagatgcccagctgcaaaaccaggtgtcttctctggctatgtttttaatgctttgtaactttttcttttcaatgctgggataaagggatcgcccacataacaagaggtttctataccagtggcacagttcctgttggttgttgaattgtgcactcattcttgagattttaagtcattaacatcttttgctctagtttgcaaatcaggcagtgtttatgcctgcatcctgacatcagcttttcatatgaggctaagaaccttgattttgatacttcaaactacgtgtttgtctagtttatttgtccacagcatacatcattgttacagttttcatattccctctcccttggggctcccttattcctgccagcatctctttcaggttatttgattacagctttcattgccactgaaaaaataatcaccaacaatgttcaacctgttacaactgccttttctactctctgccattttgtagttttttggcctactgtcaaactcatgaaaatttcaatataatagcctttaaccagctgctgcattctgttaggatttctttcacctttttatgttgcatgctcccatatgggtaaaccaaacagagccaagagctgggactctcttgctttcttaatgagttagaaaattgttcttctgtattctggactgtcaaaagaatttaggaatcccaaacatgcatgcaggatgttccagtatagatgtcataataaaagcataagaaatatcacactgggtcagaccaacagggcaactagcccggaactctgtcccagatgaagataccaatggttgttttgtcaggtaacctagtacattttaccttaaaaattcggatacatcatgaccacttcttaataatgcattgtaaatcaactggcagtgagtttatccaatggtgtcaaacttttcctattccccacttcagctttgtcttaataataatatgttccataaatgtaccgacttctatataaatataggcattttaatttctcttgaatctgcatcctttaacctcaaggaatggccttaattaaattctttgaaattcagtaaaaacatttatatttatccagagtcgactttagcctcacattcccctactaatgcttttcattttcatcttcccagtctgagaaattctaatcctttttagtcttttagtctgtccttgacggaaagataagctttccccttgattatcttagttgtttttccctggatcttttccagctctgttatatcttctttgggatgtcgtgactagggtggcccaaatattggttatgaaatttgttagcattgtctctagtttccactcactcatgaagaaagtaaatgttatttgctgtctcccattggtgcagaaatggagagatcaattgaggtcataacctcttctgcatatattagttctagccgaaggttggttttctgctacttttctgtaataccagcaaaagtgtttgaccttatatttctgccagctgtcccttaggaaggatttgatttttagacaagctggtcctttcctccttcaaagacgctgtggttgctaaatattgggaagaattcactaatgaaactcaggagtaaacctgctgactccatcagcagtaatgcatttcatcaggttccctttcgaaatatctctgaagcccttcacagaagagtgaaagatggggttcttgggaacttgctaactgctcagctttttttacatgcaatgctcaagaagcaactcatgtccaaaggagtgtttatcttttcctgctggtaattttgaatgttgtatatacattgctgtatatgttgcctgatgaccttgatcgacccttctcttcactctcaatctcaggcatgtttccacaaccatttattgcatctgagttttgctcacaactttctgctgcttcctgcttagcaaaatgcgatataaaaccttattggatgaagttaacagttgcttcagtcaacatttcttgttactgttgctgtttgtgctgacaaaattgctgatttgggttctgactgtcctgtcttcttatggcctaccattcctatagctctatttgtacgagtatttgactctctgcctggaactgtggccatctgtctagatttaccttttggtatatgtggctctctgtatcctgttggtctacattctggtttgaactcacggatcttggtctggtttttagtaccagtgttcccctaactccagtagcatctgaatcttgacaccaccttcccctgccccctactgtattgcctctattactactttcatggcaattttttcggattccaaatatgtcccatgcttaaagcatatcttgctctcattcttgttctagcccctgttggtaccaggcattgctccaattcaagttttggttggttgatttcttccttcataatattgattgctatttcagtacctgtatttatatacagagggagcagtgcctaactacatcttagccttaacagcaatcaacgtgttaaatatccctgtgttggctggtttgcagtagacacgtcttctgacaatgagatgggctcttattataaagaaactggagtatgatatcaacatagaaaacatttcctcaggccgggtgcggtggctcacgcctgtaatcccagcactttgggaggctgaggcaggcagatcacgaggtcaggagatggagaccatcctggctaacatggtgaaaccccgtctctactaaaaatacaaaaaattagctgggcgtggtggcgggcgcctgtagtcccagctacttgggaggctgaggcaggagaatggcgtaaacccgggaagcggagcatgcagtggacgagatcgcgccactgcactccagcctgggtgacagagcaagactctgcctcaaaaaaaaaaaaaaaaaaaaatttcctcatttcttattccagacacctcactcttctaagaatgatacaagtcttctgacattgggtttgaaaatcagttgaattttgtcataatctttcatacaatgtgaacacatcatgtagtatataattttgtgctatttctggtaagatccttcttatgtatatttttcttcaaaatataccttttagcagctaagacaacattaaataggggaaattttaaataggctaggcatcgcaagacttgaattctagttccagctttactgtcacctagctattaatacttgaccaatgggaaattgcttattttctgtgggcctcagtttctccctctgtcatttaaggaagcagaatgacatgatatcataggtcatttccagtactaacattttctgattttgtgaatgttgacttcgaaatagaaattgtttgtgatcattttccagagaagtgaaaatgaatcttcatattgcccttgaggattcttattgcaccatcaatcttatcgggatagaaaggacaaataatattaaatgtttcacttaactatttagcactattgatgataagaagtggatgcaacagagaatcagctgtctaatttgatctgtcagtctttgaggatgctggtgaatgattcggggtaattaaatttttgaaatcactgccaaaagcctgatgctctgacttttcaaaaggctttagtacacaaagataacccagaggtcaatcttctctgctgtgttttctcctctgccatttgatggtttcaaaggtcacgttacctgagtctcagtaagctctggaaccacaatgaaggaatagttggtaatacattattgatgatataatcatgaaaacaattcaggttaagatattaactgaaagagagtgaaaggggtgccatagtgttgtgcagagtgctgagtctggttttggttttatagatcttgttgggagatgtagatgttgatatcatctgtgtctcataggttcatgaaaaaaaccctcacatccttttttgtagtttcataagctgatttgtatcaccttgactgaaataacagactccaggaggatagctgttgttatctctttttctagcatagtgcctcacagataacaggtacttggtaaatattggaatgaattcatgaacatatgtcagtaattctatgtgcttttcagtttgctgactcatttcaccttcaaaacaatcttgtagtatttgtgtgtcaatttagatttaccactcaaatccatctctcatgccctctagacatgaactttagtgttaggaagcatgccgagtgtttgatagagtttctcatagctcctacagtttggtgcttaagggacagtccttggcatggatgtatgaatggtacataccaaaacatgagttctagattccgttctatcttaatctaacaatatgataaggagtataacttagctcaacctcaatgagaaggttgaactagataatgcctgggaccactctcagctctagctttgtttcagtagaactagagtctgtttttcctaaatatcattcatgaggcttcttctggttttctagtggtcaatagagctttaaattgatcaactactgtttttcactgagcattgtggacaggacctactttttgggccaggatatagtagccactgagtcttaacagaatgtcatcaatgatacatttttattttacagaaaaatgttgtaacattctatatggcatatgtcatgtggaaaggtggcaacatatatacatacacctatacatgtggcagctaaaatttaatgtgtgtatggggaaaataatcctgtattataatacacatggtatagcattccctgcctcattcgtggcacttttggaaatgtgagaatgagcatagaacatattcaagttggtttatccaaaagaagaggagtaaattatttcagctatttccccattttctttttctaactttcttaaacatgcactttcttacataatcacgtgttagaaaaaaaccagtagtcacatcaaataaatctgcatttgaaacaactgtatcatatcccaactctgttcgtttgagccatttgcttaacgtgacacccattctactttatgacacataaggaatattgcttaagaaatgttaattggctttccttttctcctctgaaactggattgaagtcttattgacctctattagatactgagtgttcaggtttttaggaaaacactcatagagatatagccccagtgtgagctgcatttttagaatattttctagaacccaaatatgtccctaatcaaagttagtttattttcattcttagcgttcccacgtaatttggggtatgtgtgaattcccaaacattcccgggcctctcctaggcttctctaattgcttcttattctgttcccctgggaagcagcatcctgttcccttcacaaaggtcagcagcaacagcccaggcaatgttttaaaataacttaataaccctgaactgcctctctcttctttgggataatttccttagagcattagtcctttgaacactgacctggttgcagaaaatgcccctttctcagtgggaaaactccaaatcccattcagtcttcccctccttccttccaggggatagggtgggggagtagggggtagggagagggtattaaatactttcttcaggaaaaatgttaacacggtaaaacactctctctctctctctctctctctctctctctctctctgtgtatgtattcttttttaaagaaatagactgtgagtgcattgtataaatcagtgctgtcacgttgcaaattttttaaaccgttgtacaagatagaaaaacagtatctctggatattgactctggaaagcttctaagagcaggtcctagatgagacttagctcactgtcggcattcggcaaatgatcacgttttctgtgataccattaactcctggggggatgaaactgaaaagcctcgctgctcttcctgaaactctcaactgcttttttctgtttttctttctcagcttatccacatccatcttggtccccaaagccattgcatgtcagatggtcagtgcaatgtgtaatttttaacttgcttctttgttgctttagaaggaatcgttttgttgttttctttccttttggtcactatttcttgttcatgagttttctgtaaacagtgtgtctcatagataagtccatgtaatctgctagacaggaagaaaagcaaagtttaatgtgtgcctactatgtgctaaatgacaaagtgtttcatctgtatcttcccatttaatccttgtaacactccacttattatccaataaagaaaaaaacggctatcagtcgggcgtggtggctcatgcctgtaatcccagcactttggcaggccaaggtgggtggatcacttgagctcagcagttcaagaccagcctgggcaacatggcgaaaccccatctctaccaaagatacaaaacagtagctgaatgtagtggcatgcacctgtggtcccagctactcaggaggctggggcaggggaatcccttgaaccagggaggcggaggttgcagtgagccgagatcacaccactgcactccagcctgggtgacagagtgagaccccatctcaaaataaataaataaataaaagttaaaaaaaaaaaaaaggaagaaacagctgagattcaaaaaagttggaggcttatccaagtcattctaataaaggggaggggggagaattgatacttaaaatcatcatgataagaaggatagacattggagattcagaagggcagaatgctgggtgaggggtggataatgagacattacttaatgggtacaaggtgcactactttggtgatggatacactaaaagcccaggttcaccactatgcaatacatccctgtaacaaaactgcacttgtacctcagaaatttatacgaataaaaataaataaatcaaataaaataatcatcatcatctcagctattgcttctagctgtttcaactttctaatgtttttgattgaaaactggccatttgtataaccaaatgtggccaatccaccactgtgaggctgccatcttgggcatcaccaaaactactctagtagtccttccctgcactgttaggtggattttccttggcgtatcttcgcaatcaagttgcagagacctaagttactctttgctgctttgggcaataaaggggaacaaaaaacaaaatgaaacaaaaacttggccagccctgatgtaagcactcttctacctccctgcaggctgagaaaacaaagtatttcttttttttttttttaatttttaaaatgtttgattctggtctaaatcaattaaaatgagatctccccccttcttttttctttttttcttctaaaaaaaaaaaacacaccaaaaaaccgagatacatgtgcagaacgtgcaggtttgttacataggtatatgtatgccatggtggtctgctgcacctaatgacccatcgtctaagttccctcccttcaacccccaaaccccaacaggccctggtgtgcattgtttccctctctgtgtccatgtgttcttaatgttcaactctcacttgtgagtgagaacatgcagcgtttggttttctgttcctgtgttagtttgctgaggatgatggcttccagtttcatgtccctgcaaaggacgtgatctcattcctttttatggctgcgtagtattccatggtttatatgtaccacattttctttatccagtctatcattgatgggcatttgggttggttccatgtctttgctattgtaaatagtgctgcaataaacatacatatgcatgtgtctttatagtagaatgatttatattcctttgggtgtatacccagtaatgggatggctgggccaaatggtatttctggttctagatccttgaggaattgccatactgttttccacaatggttgaactaatttacattcccatcaacagttcaaaagcgttcccatttctccacagcctagccagcatctgttgtttcctgactttttaataatcaccattctgactggtgtgagatggtatctcattgtggttttcatttgcatttctctgatgatcagtgatgttgagctttttttcatatgtttgttggccatgtaaatgtcttcttttgagaagtgtctgttcatatcctttgcccactttttgatagggttgtttgtctttttcttgtgaatatgtttaagttccttgtaaattctggatattagacctttgtcagatgggtagattgaaaaaatgttttcccattctgtaggttgcctattcactttgatgatagtttcttttgctgtgcagaagctctttagtttaattagattccatttctcaattttgtcttttgttgcagttgcttttggcgtttttgtcatgaagtctttgcccatgcctatgtcttaaatggtattgcctaggtttccttctagggtttttaggatttggggttttacatttaagtctttaatccatcttgagttaatttttgtgtaagctgtaagggaggggtccagtttctgttttctgcatatggctagagagttttcccagcaccgtttactgaataggagatcctttccccattgcttgtttttgtcaggtttatcaaagatcagatgtttgtagatgtgtggtattatttctgaggtctttcatggataggaagaatcaatatcgtgaaaatggttatactgcccaaagtaatttatagattcaatgctattcccatcaaactaccatgaccttcttcacagaattaaaaaaaaaactgttttaaatttcatgtggaatcaaagaagaccccgtatagccaagacaattctaagcaaaaagaacaaagctagaggcatcacaccacctgaattcaaactatactacaaggctacagtaaccaaaacagcatggtactggtaccaaaacagacatatagaccaatggagcagaaaagcaaaggatttctaagtcatattccaccacctccatcagggcttccctaagatagagagtatggccaagaccatacttaataaatgtcatggaatgtgtttctcttcataccctcaattgtaagtctttctgaaaggtagcgcgtggtcaatttagatggacaagaagtgctctgcaggagcctttgcaacatttgtgcatgtccttgattttgacaccaccccccgccccccattccagaacagatcgtctcatccttcccttaagccagaggcctatggttctagctttactaggcaaatatatatggtctgtggctataagtcacaatttctcccaagccttgagctgggggaatactgagtctgcccatgtattacatgcagaacatttcatcttattgcagaatgatactttattcttattgcagaatgatattcattattgcagagtgatattctttagtctttattttttatcattataactacatggtgcaaaagaagtatttctcatactttttctcataatgactcaaaattacaaaagcaatctgggcaattaatatgtttttgaagataaataatggcttatgttttctgaagattaagaaaaatctctgtctgaatatagctgggcacagtgtctcaagcgtgtaatcccagcactttggggggtcaaagcagaaggaacacttaagcccaggagttcgaagccagcctgagcaacaaaatgatacctggtctctacaaaaaaaaaaaaaaaaaaatccttggcatggtggcatgtgcttgtggtcccaggcacacaggatgctgaggcaggaggattgcttgagcccagggggccgaaagttgaggctatagtgaaccgtgtttgtgccactgcactccagcttgggcaacacagcaagactctgtctctaggaataaaaaaaaaagaagaaagaaaagaaaaatctctatccgaaaaatgtaggcaccctgtgttaatatgtaaatacaagtgctttatcaaataaaggctagattaattgttttttctcgctcttacttatatcaatactacaagaacttttctgccaaaaaaaaaaatcaaataatagaaaagaatgaatcctagatagagcaggaggggctgagcaggcacagcaaaagttcaaggtggaaatatctttatgcatccaattaaaagtaatttgtgtacattttactcatatatctatatgtacacatacatacatacacagacacacacacatatatatatatatatatatggagagagagagagagagagagagagagaggacaacgaagaggaaactaaagagaataaagggtattaacagcaggtctgtgacttattccctgggggatgtgaagggaataaatgaccttaatagaccacttcataaacatgttaatgacctcccagaccttcttgtttatcttgttaatagtggttaactagaggaaagatacctgcaaatccctatctataaaatgattttagtagggtatacctggcctggctagatagcttattgtaaataaacctggaatgtttggatttatgagtcgtggctggctggagaatagggcatagctacatgaacgtttttctatttttgtaattgacagattataaaatggaaaacttttgagactgaaatgatttcctttcaatgtttctgtgtaaatttttaaaaacgtatctgttaatatgaaaccaaagcacatcataatgggaaataacatggatgttttggaaacgcatgtgtgattatttcaggttccccagggaaataatgttctatctgtgcccagcacttccctataattctttcagtcattaataaagattggtactagataagaatctgagatttgtgtgagtctgatgtgagatccaaatgttatacttacacaatttgtgtttattttagtttaaaaattatctttgccatgagcaagaggggaaaaaaaggaggatgagcgggcctacatatttttccttaacatcttgtcccaagttttaggaaatcacaagtctaagaaaaggccagggtcaggactaggaagtgatataacagttatacatgtctacctttaaaattatataagtaataattaatttttaaccttattttaagcagatcctagaaatagcaagagcctctataacgtcccagctaagaccccaagttttctttcttgtttaactcttgaaatattttgttaattttcagatcccttgtctcctcagttcagctgtaaactctctgacaacgcttgtgccttatgcatctttgcatcatccctagcatgtattatatatctcacatgtaaaaataataataaatacttgatcatttgttttgattttgatgattaagcactggaagctgagctatgatcccaataggtatgcttatttaaagaaaaatagatggcagtccaggcgtggtggctcacacctgtaatcctagcactttgggaggctgaggtgggcaaatcacctgaggtcaggagttcaagaccagcctgtccaagatggtgaaccccgtctctactaaaaatacaaaaattagtctggtgtggtggcagatgcctgtaatccccactactcaggaggctgaggcaggagaatcacttgaaccctggaggcagaggttgcagtgagccgagatcgcaccattgcacttcagccagggcgacagagttgagactccatctccaaagaaaaaaaaaatcacacacaaaaaaatagatggcacggcacagcagcttatgcctgcagtcccaacactttgggaagccgaagcaggaagatcacttgagtccaggagtttgagaccaggctgagcaatatagcaagactccatctagaaataaataaataaataaataatttttaaaaaatagacaataacagataaagaagttccatgttatttttttaaattctagatagccccactggtgttacagtttattaaattacatttggaagcgattttttagcagtccatttattttgtatatttcagtttgttgagagcagatggggttgagtgttgatggggttgattgcctggctagattatgctataaactataaatctttgaaagttactgttttgaagaaagcatctttaagtgaatatattccttcagtagctcctattaccaaaactgttgtgagaatatcttaggaaaacaccttaaaatcctcttctatcaaaactcccaagctttcttcaggagccagcattgttcagtgaatgcatgtaagcctatgtcttaatagagggatccctaacctctggaccatggactggaacagcaggaggtgagtggtgagcaagtgaacattactgcctgagctctgcctcctgtcagatcagtcgtggcattagattatcgtaggtgcacaagccctattgtgaactatgtatgcgagggatctaggttgtgacctctttatgagaaactaatgcctgatgatctgaggtggaacggtttcatctcgaaaccatacccccgcccctgcctcccagtctgtggaaaaattgtcttccagaaaactcatgcctggtgccaaaaaggctggggaccactgtcttaatagatcttgaaaaaagttggagtaaggtaagtggtaaatcctaagacatacattgaggcagagctgcagtggtatccagtagggaagaaaagacttcaagtttagaattcagttatactcaaccagtttttgcctttctctgttaaatattagatatcattaccagacacatacaaaagattttaattgcatgaatgcccgatgttgatacaagagagccgatttttttttcacacatagttttttggggtttttttggtagggagaaacatcatctcatgatatcgttttaaaggtgctttattatcaaggaccttagagctttttctctcactcatatttcatatactcttagtcctcaagccatttctttttactgaaagcactatagagtagcaaaaggcatcattatattgctcagcctcattcatcatcaacaaaattgccaattatattccaagtccttgaatgtattgtttaaaaagatgtataaggtgaaaggaagcagttcaatgttgaggtggaagatgaaacatactgactggtagattcagagcatactaatcttgttttcacttgtgaactggaaaaaattaacatggagggatggagaaaacatgttcaaactacaaagtcattttttctgagaagttatctgactgtaactgtaactgtaactataactcagggtatatcagagggctcaaatgtggaacacttctttaaaattaaaacctaaaagtcctgatgtgtaatagaacgtgtaaaaatagcagcctctgaaggatctgagatgagcagaggaacactgaataatataatctgacagtatgggccatacccttacagtagttgccgtggcctggaaactatagaattaattcagtaaaacatcagaaaaaaagcaacataaatataaaatattttaaattaaaaagactgaataagaacagaaaaaaatcccctagcaaatcaatattgcttggggaagcatgaatcccagaccagcaatattttaatccaaataacttttagttccatcgtgaacacctttatcaccaagttttataaagagtggagtgaagaaaaaaagtacttgaggttgttggaaacacttctcaaagttggtggctttattcagagattcatgcttgactgtaccaacttctgtttaatttatacgtagtactttgtcaatttaggaatttggtttacttgtcctttcctaaatatgtgtattacaaaacaaaaaatagagaaatgataaaataattacaaagatgattaagcaatagtgttggctatagtgaacagattattgccattttatagagtaataatatacctaaggaaatctgtgggaaatttaatttgggatataaaacacagaagtcaggcggagatgaaataataaaccaataggaaattaaatttaggcatgagagtccaaagatgtaaattctatagatgttataaaataatatgtatgcccttacataatttcattactctctgaacttcatttctcagtgaaatatggggaaatgatactgaacagtgcagcagctcttccgcttatgaaccaaccagaagatatataaacaactcttaagggttatacattataaagatataatttagtctggatttttttttaaatttgaaaactaattttatataaaccctaattgggcaattctccattctttgacttgaatattatagtaaatatgttttcccaatttccaagtttcatgtattattttcaaagaaaaaagacaaacttttaaatgtccagctacctgggacttcctctgattatcttttaaggtagttcaaatatatacaatttcaaacaacaacaacaacagcaaaaaatattttgccagacaatatgtcttgtttgtttttaatgttcacaatgtaaagtacacttattgccaaacctcactttcaatggtgttacaaattagccaagtataactagtttgtaaatactaataagaaggttgctgaaattcagccctgaatatttcttttctgcaactccaaagaggaaaatttttgaaatgcaaaccttgacctttatcaaagcctaggtgaagtttgttggaggtgtttggttttttgctggtgctttgttataatgcagtttgaaagtagactagattggcaagacataattggctgctgtgtggagaatgcatttggtggaacacgtgagttaggggtgaggaaatatgaagagccagagtggaagcagggagaccagatagtagtgtgggaagcactggtgttagataagatctagataaaggtagcagtggagatcacaagaggtggttggaatcagggaatatggtttagaaacaatcacaggtcttgctgatgcattggaggtcaggagggacagaaagagggcaatccaggtgtctcctcggctttcagcaggaacaggtacttaaagaggaacaaatttggtagggaaaatcaagttttagtgttccattgcagtacatggtaaccatggctaataataatgtctcatatatttcaaaattgctaaaagaatagatttttaatgttctcaccgcaaaaaataaatgatatgttggtgaggtaatggatacgttaattagcttgatcaactctttctacaatatataccaagatcaaaacatcacatcgtatcccataaatatacaaactattatttgtcaattacaaataaatgaaataaataattttttaaagagatgtcttaaagggtggcttgaagagcttctgtgctccaataatacctgcccattagccatactttgcttccagcaacaacaggaaaacatttaatctaaacaaaaaaaaattgcttgtcaactagatagctactcttccgtgtagaaaccctagagctgcctgggtttagacatgtttaagtttgaggtacttattgggtatctagctgtgcagttcaaaatttggatctgaagctaggggaagacgtcaggacaagagctttaacttttgtaatcatcaatatatacatccttcttagagtcatggggtgggatgccatcatattgggatgagggaggaaaccctgggacttcacaatatcgagctagtttctgttttgcaaaaggcaaatgtattaatgaattcattacattaattaagcaaactatatttattgggggctattgtaccagctattgtaaattttatattttatattatatatatatatatataaaatgctcacaaaataaaggaactaagtcataaatatgcatatgatttacataaaggagctaaaataaggatctctgtttctgtttcaattctttattaaagatctatctaagactataaagacatatataacaaggtacaggaggtaaagagtatattcttaggcatctaaaaatttttcctatgcttttgaaatctgtgtgatttactttcttgaattggcctgtaatataggagtacaatatcattgcagagattaattagtgtgtttgtgaactgttctcaaatgctaaaatgaaagcataaaactataaaatggcatcattattccttaaagaagcatagtttccaagggtgtctctgatcattgtcacagcataaatgaccaatttcacccataattagccaagttagtaagaagttattttttactgggtatattttgtttaacctcagttatatttgtaaaagtagaaactgctacttgttactgctttcagaatttctcacaaatgctaaaatgctttttaattctaatgcacttaaatggtttgattctccttacctaagaaaaacatttatctaaagatatactcttgactgattcattcattgattcatttgtcaatagatgtttatttatcagaatatgtgcaccagatacattgctagatgtaaagggtacatttggtgagcaacatgcatgatacctccaaagtatagccagggaatagataatggaaatgacactaagaatgaatacatattaacacaaaaagagagagagagtcatgtgtcaaggcaatttagcaggagggaacttgtcaatacaagggattaaaaggacagcatgactagggctggaggaggtgaggagaaaactcaaaaagtcctctggctgatgcaaatgaattggatgaggagcctatgaatacaaacgtttgaaggttactgatgaaagccaggtgagagaagatgggatttggaccaagatgatgatagtttggatatggtgagaaaggcatagatttgagagatttttaggaggtaaaaatccttaagatttgaggatagatatcataggaggaagggcgcaaagagaaagcaaaacatgtcaaggaatcacacctagatttctgggcaatgcacagttggtaattctttacagtgagttagggaactctaaagaaagatcagatttagggtggcaatttgattgtaaatgtttggatttcaaatgattggtgacatccaaaaagcactgtaaatagacagatagtgtgcacctaaagaaagaaggaggcgcatctgggttggagtcactaatttacatattacttgtatatagctagtaactgaaaccatgagtgtgaatgagattctgatgctaaattctggaaggtcactttttaaagtgttttgctttttgaagtacaggtgcaatactaaaaataaaaaagactaatttttaaaaattaaattaaaatgaaaagcctggaaagataaacaccaaagttatgatactagttgtagtatgggagagggggcatcagagaggatcggaatttcatcttgaatggtgtattttatttcaaaagaagctttgagcaaagataaaatgttaattctgagcattagaaggaacacatttgtttttttgtactgtggatctttttgtatttcctagaactcttaatctaaatcaaatattgcaaaatatatcactgtaaacaactggttggtcactagctttttaaatactttgtagcaacttggttgcttgtcagaggtcttctttgagtgaagtctttaatttatagttctttatgcttgatcagcataattgcaccaaactgttacttaatctgaaaaatagctgtttcctagagccctacttaatactgaaaacctactgtgtttgtattgcaattgcatttttttttttacttttccccctgcttttcagtttgtataatttctgttaccctatattcaagttcactggttctttccttgtctttgttgaatctacagatgagcccatctaaggtatttttcttttctgttactgcttttaatttctagcatttccatttgattcacttatagtttccagctctatactgaaatatactgaaatatagagctggaaactataagagtgaatcaaatctaatcttgcatattgtcttctaatcttacatattttctatctaatcttgcatattgtctttcttttccctcaagagtctttaaaatattaattatggttattttaaatttcctgtctgatagttccaacaactgttacatatctaagtctggttctgattcttgctttgtctccttagactgtgatttttcttgcttaggcatgctttgtatctcaggggtaaaagtcaggcatcttagatagcgtaatagatactgaggtaaataaacctttgacatggtaatttatcttaatctgactgggaattgggctgtgtttgatgttggtagttgctttggttgtcattgttgagttttgttgctgctgtggccaccagagacttcaaattcctctggtaactttgtttcctcattggaagcttgttagtgtagtggttgagtgtcgggcagaggcattctctaatgtttgaattaatacacagttggcctgggtcttggggatgtggtctttacaattatttctttcccttcctccagaggtagagtaacttcaacctcccattcccttcctggagctgcagtggatatccaccagtgttctcagtctatggccccaaggccctttctcctgcataaggctgaaaaacaacaacaacaacaaacaaacaaaaaaaaacaaacaaaaaaagaacaaaacaaaaccacacatagatgagatctggtgttcccttcccctaaaatgcagtggtatttcctcagtgcctgatatggtttggttctgtgtctccacccaaatgtcatgtcaaattgtaatccccacatgttggaggaggggcctgatgggaggtgaatgaatcatgggggcagatttctccgttgctgtacttgtgatagtgagtgagttctcaagagatctagttatttgagagtatgtaggactttccccttcactgtgtctatcctgctgctgtgtgaagatgtgcttgcttcccctttgccttctgccatgattttaagcttcctgagggctccccagccatgcctcctatacagcctgcagaactgtgagtcaattaaacctctttgctttataaactacccagtcacgggtagttctttatagcaatgtgatgtcttttcctctgaagagaagggtataagcagattcatggtgactagctactgtgacccttccccaatcagcaacacagagggtgttggggaggctttctccagattcttcgcatcctccttgtgaaggcaaggtacagttcctgaaggaagaagcttgcaaaaggttgggactccacctatggcagtagcccccaggatcttcacactctcaggctagctcccacatgtcccccaacaatttaatctccctactagtttatatggcatctgctccagggatccaaatgctcaggcactgcttctggctaaaggccaatctctctccagatttcaggttgttctataatgtcatttctctgatggactgatgaaaagtcattaatttatctgtccagcagttttcttgctacaagtatgggagcaacctctttgcagctctccatctccatctccaagttgaaactggaagtctgagcaatacattttagaaattaatatttgtaagttttccgtgtcataacaaaaataataaatgttcactgtggaaaacatagaaaaagattaaaaatatttaagtgcccatcaccacctagacaactgcaatgaacatgttggtaatgtcttcttccagttttttaaaatctgctgataaaatacaaaagatattgtttatataactttgtatcctaccttttcttgagcaatgcaagtttaaacctaaatacgaagatactctaacttcctactttacatttttgacggcagatgtcagctgtcttcccaagtgcagtacccttggcttaatatcaggtagacaaataaggccaccacaaattcacctttcacctcaataacacaggtaatttgatagttctacagaccctataatattacttgactgaagacccagaatacaagtctttcaaggattactctagaaactatataaagtattggtatcatctcccttcatcatatcttgccaaatccaacaggtttggaacttctgtaggaagatttttgtaacatgaaaaatgcgtgttgcaccttccatatccagcaaatacaccatcggttttttgttggctgcaccaatgacataaaatgatttcactgaatagggggtgacccagaatggaaatgtagagcatcgaaaataaaatcaaccgacgcagtctttgcagcaaaccatgtggaaacaaatttaaatatggaacatactctttccaactcatcttcagatgttgctttaaaatttgtgcaggtgaaaaaaaaatctttattttaaggtaactcaatcttttaccattggagagaatagaattatttttgtttcctcttgtatattcccagttgtttaaatgttctctgtttccttgtgtggacacataaatccaaatatatctaatatcaaggtatttaccatatgcagcactttttcctcagatagttattttttgaaatattcaaatagcttacctgtatcatcccccccatccttttttttttttttttttttttttaagacggagtcttcctctgtcaccaggctggagtgcagtggtgcgatctcggctcactgcaacctccacctcccaggttcaagcgattctcctgcctcagcctcccaagtagctgggactacagttgcatgccaccatacccagctaatttttgtatttttagtagagacagggtttcaccaatttggccaggatggtcttgatctcttgacctcatgatccacccacctcagcgtcccaaagtgctgggattacaggcgtgagccatcacacccagcctaccctattttctaaacgaacaattagttgacttttcttcagttcttactcagaaatatctgaccctaggttccaacttttgttttgctctttgcagttagtttttatgtgtactgttagggagatgtgctttttttttaccttcaaatttaaaagagagagttttcaattccttttaagtcaaaatacaactgttctactctaaagctttctttaaaaaaagaaaagtaccaaatcctcatccgtagtaattaattttgacagtgtaggctcagtagtgattcacaaacctgtattttgtgcatcagcattccttattattctaattaaagtggaacattgtgccctcgctaatcattaatgggttttcattttgtaaatgacatttgcagaagttaaaacagcgagttcatgtgaagtccacaggcaacggtgttgaaattagcatcaccatagcaacagtcttccatcattagcattcagggcaacaggaggtgttttgttgtgttttgtttcccaaaaaaagaaaaagaaaaaaacttcaaaggtaaagcctacagaaactctctcagaagatatttatgttccttgtgtgtatgtgtactgtactagacctctaagtctacatagaattttttttaaaaattgcaatgtggatcatctcctttccagatttgtgttttgcctagtatactagctaaatttcatgatctttctccagctgtacacgtctgacctgctgagcagcatttactcattgccaacctgctgctcaccaatagggtttcctacgtggatgaagagagtctgtattcatgaaaatatttggttcaatctaaaagtattatgtgtattcatgagtttttaatttaattcatggaaaatagatttatgctgttagatcctctggtgaactcatttagtcatgttgtagatataggtcaatgattattctcattcatgtttagacggaattaaagaggagtcaaatagagaacaatattatcttaactgagtctctggcagtggtattaccactattactctgtatgtgtgtgtgtgtatgtgtgtgtgtgtgtgtgtgtatgtgtgtgtgtgtgtgtgtttgaattctaatattctgggaaactttaaaagtggcatatctagcacttatgtttttctcagtactaaaatgcataaaagagcaccatattgacctaccagctgcttctaaatcacaccagtagtaggtaattatgaaattcaaatgaagtttaattttcatttattatacaaaaatgtcatagctcaaacccagaagtgttacccccaagcttggatatagacaggtatgtgtgtacattttacttttcaagatgaatcatagcagtcttctccattacatgtaaggactagaagttgtacattccactcaggtacctaaaggcaagcctgtgctagcccacactaacaaagcaaaatgaagcaaaggatctatctggctttcaatcagggatgcatctatgctatcatcagctctgtcacataataaatgagtctatagataacttgaactactcagccaatgggctgtaacccagtgattctgtggtattgaaaggcagcaacccccagaagccacatgtctcagtgtgcactccaggactgtaggcccatagaacttgtatgtatgcacacatgcatatgcattccccacttttctaatggcgatccaatctaggcctaatccacagctagtccagaaaagaacttttttaggttttctgtctgccatcactttgttgagaggcagtacaagccaagcaggtgtctgtatttataatatgcacaatgttaggataactcaaactcataagggaaagattaatggctgactactatgaaaaccgcttctagccttgtgataccagcacctactatcttcctttttctcttatatgatgaaaagatttcaatgttggcttttcattctgatagaatgtgcaagccaaaatctaaataaagtccagtggcaatgatccccttaaacattatatctttcttctcgatatgctgatgttttcccttataaaaatctatgtaagtttcaagatttatatgacagacaaaccacacaaacaggaggtccctcacattcactactagtcacttgctctatcactctgggaatagcggtcttcagattgcatctctactctacctcttgctcttttcaacccctctcctcttttttagaccatacagggcatcagacaaggtttagtttaccactaaactttgggatttggaagatggtgtataaactgatacaggtagtccactcacagatgtagtatataattacagacttgagttttcaggggctcttctccagtttcctgtcaatcaatttccctggctgagacattagcatttgtcagtgaccatgcttactatatacatacacaattgtgtatacacaattgtaaaattaaatacgggctttagaagagattattttttcttaagagtaggttactctataaatgccaaagcatgtgttatgacatagaaattcaaatgactaagaatagctaattgtttagaaacatcttacttgatgtctattgttccaaaatttgatccaatttagagtggtaccaatccatggtgtagaatataaaagctaaaggataacaaaaatcctaggaatctcatgccagtaagaaagttctaccagtcagatgagatgttgagagcatttatgacttggcatcaggaatattataagtaaaattcatgtgagcagtaattgcagctatgaaccatgttatttgttcccacttgtccaactgtaattctttcacttagctcagagtagttctttgtaacattagggcccactcatctgcctttaggtagggttttaaaagatgcctagaaaatagttctgtgctagaaatcagagactcttgacctactgtaaagggagcagtaagcacgtttcctcaggagaatctttctacatactgcagattcccataaaaatctttgtgacaaaattgcctttactgaaaccatcatccattggattaaaaaatagcttaccattagctttttgaaaatagaaaacgttgagccttttcaatgatactttcaatagtttttcacaactatgagtcctcaagctatcagtcttatttttagataccatacttataagatagttatagaatttatagagtatggtttaaaagactattcaattatagagcaatcattcagtttattcccatggcagaagtaaatggaaaccactccagatcaacaagaatctactctcttctgattcagaaaagagatttcctatcttttcatgaataatccatgttcaatgtttaacacctcaggaagattttcttaatagcttcttctggtcataaatccttggtctgtcatcagggacatattgaagagttagttaccaaagttcttaatgtctcccattgtaaaaaaaaaaaaaaaaaaaagtcactttttggattgtttctttcatagagtccatgcttctgtacgcttaatactttagcttttgacttcaagctttaggtaatgcaaatgaagctattacatcaccaaagttaaatttttcttgtaagtatattctcaacattcacaattgagagctgcctcttctttggctggtataaggttttaatttattgtagcactttcaccctagaatggcaaaaaatgttgaaatcaattccatatatcaccaatacaaagtactaagtcaaggccgggtgtggtggctacgcctgtaatgcaagcactttgggaggccaaggcgggcagatcacttgatgtcaggagttcgagaccagcctgaccaacatggtgaaaccccatctctactaaaaatacaaacattagccaggcgttcatagcgagcgcttgtaatcccagctacttgggaggctgaggcaggagaatcgcttggacttgggaggtggaggttgcagtgagccaagatcatgccattgcactctagcctgggtgacagagcgagtctcaacaaacaaacaaacaaaaatattgaattgtacaccttaaatgggcgaatcgtatggtatgtatactaaatgtcaataaagctgttatatgaaaaaaaaatgctaacacacacattctgaaagtatattaaaagcaaacctacggccgggcgcggtggctcacacctgtaatcccagcactttgtgaggccgaggtgggcggatcacaaggtcgggagatcgagatcatcctggctaacacggtgaaacccagtctctactaaaaatacaaaaaattagccaggtgtggtggtggacgcctgtagtcccagatactcgggaggctgaggcaggagaatggcgtgaacccggggctggagcttgcagtgagccgagatcgcgctactgcactacagcctgggcaacagagtgagactccatctcaaaagaaaaaataaaaataaaaaagcaaacctacaatgtctcttacaaacacaggcaactattcaattccgagtttacactactgaaacacacatgaatatgacactaagagaatcacgtggatctgcactcttcaatcaacactacgtctctgagcacaagaattttacatctgatttccatttggggaaatagattcagaatgccataaaccagatacttcttgccttcctttagtggtcatttctgccattatcatttaagggaatggatctccttctcccaaaactgttaccctaagattacaagcttgtcctttaacttatctctgaaagcacacctctataacgggtcatcagtattcagtcagctaattagactgcagaagtacgtttactcaaatgtgaggagataaaattgtgaaatgtaagaggaagaaagaatgtcaaagataatccaacccaaactcttcatcttacagataggaaaatggaagtccaaaaggggaaagtaattttagtaacatggctaaactggtctagaaaaccagatcttctgatacctgatcccatggtctttctaatgccatggatgttcgggtagaggatatattcaggtagataacttatagatagccccatgtgtttgtatagcactttatcgaacactttcacctctattatcacacttgattcttacaatatcccatggaatgtttgagtatcatatatgattattcttattcccacagacttggaaactgaggctttgagatgtctggatctatcttagatcatttgctatggactagaatctgggactaagttgcttttgtctaagctgtgtgtttgttctgttgtgccgtattgttaattcatttctgttggtaaacaacacaaaggaaaaacttctataattatgtttctttttcatcctcaggtcatctatcctactttttatctaagctttggaaaatattatgtgctttccttttttttgtattttcttttcgtagagatggcagcagggggtagtctcaccatgttgcccaggctgacctcgaactccttggctcaagcgatcctcctgccttggcatcccaaagtgctgggattacaggcgtgagccaccacacctggcctattatgtcctttctttagcttgctcgtttaaccatttgtttggcagggggagtcagaactgtgttttacttagtcgattaactgataggacaatttaatatctaccctgcactggcagtaacccccatagccccgctctgtgtctcattctgtgccctgaacaaccttgtcttaaaaacattttaaaagcagcaagtatggggagatttcttatctccatataatacagaagcaagtgtagagtatggctacggaaaacaaccagcaggtgaggctgtgacataacaattttaacccaagcctcactgccacattgaggtatccttgttcaataaatagatcagaaaatatggtgtagtttttccctaacgctgtctaaacagcaacaacaaaaaatcattacccatagtatttcagtaatgtgttgtattgaatgcattgttttcgagggcgttttcaaaaaataagttgattgaatctcttttttttgcttgaagaatgacccacattcagaaagtatacagatgaaacatgttcagctcaatgcaattatcacaaaatgaatacacctatgttcgccatctaggacagtaaataaaacattatcagtagccctaaaccagattacacacacacacacacacacacacacacacacacacacacactaaaccagactacacacacacacacacacacacacacacaccgggttgggggagtggtgagagagagagagagaaagcgaatattatgttaacagttggggagtctaagtgaatggtttatgggtgttcttttaacatttcaattggtttaaaattttcaaaatgaaaagcttgaggagaaacatagaatataaccactacctcagaaatcaccaccctacctcacccacattccctctcccaatcactattcctccctcatcttaaaggtaactgctactctgccttataacactatggttgagttttgcctgtttatttgaactctataaaaatggaattgtacagtatataaccttttgtatctaggactcaacattgtgtttatgagattaactcatgttgttgcatgaatctgtcatacattttcattgcaatttgatatcccatttaaaatgtatactataatttatccattctattgttggggaacattttggttctttccagtttgaagacattatgaataaggcctcctatgaacattctttaatgcgttttttggcacacacgtgtgtacaactgtgtttggtatatactttgcagtaaaattgcctatgttgagggtaggcatatgctgagctttagtagatactcctggttttccaaagtggttgtaccagtttacaccatcattagcagtatatgaaagttctagtagctccacatctcaacaatacttgatacttgttagtctttaaaattttcgccattgcagtgagtgtgtgagtagaatctcattgttattttaatttgcaattgtctgattacttatgaggttgaatatttttacgtgtatttattgaccattttggatatcctgttgtgtgaagtatctattcagtctcttgcctattttttttattgattcatccttctttttcttattgatctgtaggagttttttttacatattctagtttgtagccctttgtaaattgtatgtgttgcaaatatcttctcccattttatagctttccttttaattaaattgtttttttgattgatagttcttaactttaatatagtccaatatgtaaatttttccttagggttaattcttttgtgtcctctttaagaaatctttcctaatacaagataatgaatgtatcctcttttattatcttctagaaacttactattttttaacttttccatttagatatatagtacacctggaattgaccttttgtgtaatatgtgagatagagattgagttttatttttcataatatggatatctagttggcccagtacttgatgctaaacattcatttagaattcatttgatagtatttcctttagagttattgcatctgtgtttattagttatattggtctgccattcttgtcaaggtttggtatgtggattattctggtttcataaaggcaagtagggaagcattgcctcttctagtctctggaagagtttctttaagattggtatttctgccagtgatatgatttggccttggaattttcctagtgggaaaatttataattacagtgtttatttcttaaatagtacagggctattccaattttctatttcttcttttgtcagtgtcagttgacttaaagcacactaagatactctaagattgctatggtcagcctttgctggtctaaaccagaggttgcaaactgaaatgccaacagaggggctagcctgctactgtaactgggcaaggctagcgaagcgtaagttaatgggagctggtagggactatagaatacatgtgccgttatagaatggtggctccggaaagttattgtcatgcaagaataggagcccagcatggacaaatcattccttttaaatgagaagtcagaaggttggattattctgtaaaatatctctgaatatttaaatgttgagtaattcagattaaaaaaaaaaaaactgtgtgggctaatcaaaacatttgtgcatgccaaatttagcccaaagtctgctagtttgcaacttgtactttcaactaatgaaaagcgtaatagcacagatataattccattttcaaataatataattcatttatagttgacatttatttaatttacacttaaatatgaatttgtcatttaatttaccatattaaaaaagtttagattttaagacatccaagtctgcaaataactagaatattttcatttactctcatgtttgtgtacttatttttccttaaatgttattttcatgatatacttagtgtcttgtggacattccaaaaaactgatttgacttaaattgtcctcactccaagctttaaaattgcttagttcatagcctaccttgcctaaagcaaacctggtagtctcatttcaagttactggattttttgtttgtttgtttgtttgcttttgccttgtttcttttcaaggttatatagagtgaaggaatatcagacttcttttaatttttgcagggaattcagattgctgtggattaagatcctatatataagatgcttaggatagaggcatcatgaatgaaaaattattcatatgaacacactttttagagtattatttttattcattcagcaaataatcatagctgccatactaggcaggtagggaccatgaagactactgtccttgtagtctaaagtcttgtagactaataagatatgtataactgttaaatagtacactgaaaatacaaccttaaacaatcaaaatatttgcaaattgtatttagttgacatgattgcataattgtatttatgtgacaattatatttgttattcacatatttagggagtcaatatgtacttaaggtaatctttgagctattttcaggatgaggtattagctcattactattaatactaccatcaccaaatgcattacctacttatctgcatttccaggaaaaattcaggaaattaggatttttaaaataataaaataatagtaaataagactgggcatggtggctcatgcctgtagtcctagcactttgggaggccgaggcgggtagattgcttgatgccaggagttcaagaccagcctggccaacatggctaaaccccatctctactaaaaatataaaaatcagccaggcatggtggcgtgcacctgtaatcccagctactcgggaggctgaggcatgagaattgcttgaacccaggaggcggaggttgcagtgagcagagatcatgccactgcactccagcctgggcgacagagtgagactctgtctcaaataataataataataataataataataataataataaacagaataataacctaagtgactatatttgatatatagttaagtgatgtttttgtagactttactaaactaaaaaataaattagcagttatttaattttctagtttataaagtacctacttacataaagttgcatatattacttcatttaattttaaaagaatatcgtaaaatatgtaggatagatttccattttatagtcaacaatacttattatttcaatacattatgtgattttttttcccccagtatcacagtgttagagcccaggttcaaaccagcattttctaactgtaagtctggaagtctgtctgcttactctatgtaagatgccttatgaagttcatagaggagacagctcagtggattcaggcctggtcttatattttgctgttcatcttgttttaagtgttatgttaagcaaataaaacataactttaaacattctgtttacttttaaaatttgatttagagctaacaaaaattagaatttgtactccatttacaacgaacagaacaaccaaataagcaaaattgtatttgcgttgtcaattacaataaataattataatggtatatcagagtgttaaattttgatttttttttttttgagatggattttattttattttttattttttttttttttgctctgtcacccaggctggagtgcagtggactgcaacctccacctgctgggttcaagtgattctcccgcctcagcctctcgagtggctgggattacaggcacccgccatcatgcccagctaatttttgtatttttatagagatagagtttcaccatgttggccaggttggtctcaaactcctggccttagatgatccacccgcctcgacctcccaacgtgccaggattacagatgtgagccgccacacctagactaaaattttatgttcttatatttctttaaggaaagcaaaaatgttgacagagagggttaatactagttatatatacaaaaaacctaaaaataagattttggattattctattatatgattattcatttattgaaaatcataaactaattgaatgactgagagcagcactaatgtgattactttggtaggaatctgtcctccaaagttgtcagttgtcagttattcttagcattttgaactgaagtctatgtaattaagtcacctgttgtttctgacaaaatgagcaaacacacataaaatctcttggttcgtcttcatgtctctgtggcagagaactgaccacattattcagttcctttgtcctttttagacaaaagccacctctacatggccctataagtcttcaattcaaggactatagccgttatcttaatgggattgtacttggttatctgataaattgtcgggaacatacccacattgcttcctttacctgacataaaatttagtcagctggggctcaacgattgaccagctttatcttgcacgtagtgaagggaaggactttcttactcctggatgtgcctaaatttaagcctttgaaaaagattgaagataccaattggcctacctgccctaagtagatgcttcccacagacttaactggtgaagtgcttgtctaaggtagacagaattttttctttagagaggagcaaacaaaaacccaaaaatactggcgtgttcttttgatgttctatttcccaattgatttccgggttcacactactccacaacatcttactgtcccattgcatcttaaccctctctcctctcccgcccccactttttttttgtctgtttcttctgcttccaccgttgcttctgctctgaagcaatcattttctctcccttcaaccaagggtggaattggcacacagtcaattggcttgggagactgcttactgatctgtcttttttgaacactggaatcttgacactggttatcattttgaggacagcctggtttggatatttatctattaagaggaatccttaattggtgtctttgactggagtatttgaaggagtctttaattgggaggttttaaggcaccagaaaagattcattaggaatgactgacctcatgttatataaatgagaaatatttaccatttgctgtacacgtaattgaagcatgattatacataaaagcatataattaaaaaatgtaaataaatacctaaataaataaatgcctataactagcatggcaaaggattctgatatcagctttcaatctcttttagtagagactggacaaatcagaaaaagaggatttatacctgtcctcctatagattatgctttcttctcccatcatccagttttaattgaatctcctcattgtgctttctttcaatcttgagctgcacaagttgttttctcctgtcagagcttttaatacacattgacaagaattattagtctctatctgcagttgttccaagtgcaggtttgaaataaggagtcgtcatcaatgtgctaacgcgtgctacttttggtatttatacaaagtgcctgctgccagttacttgccacttagaatgtgtttttcttttcctctcttgcgttgtgggagtagaaggattctctgtttcttttggcagacagagaaattttcagattggggtctaatgaaagaaataggttccattatacagatgtacagatgttctaaggtcacgatacctcctataatattcttatgtgaaacctcctctttatgttcaacctgtgtacgttacacttatacatagcaggcatagtagccatcaatattagttactttaaaacccaggcctcctaggctgtggtttgtactaaaacatcatattcaaataaaagcattccaatacaaagtggagaaacagggacaggcatggtggcttaagcctgtaatcccaacaggctttgggaggccgaggagggcagatcgcttaatcccaggaggtttagaccagcctggccaacatggcgaaacctgtctctactaaaaatacaaaacttagccgggcatggcggcacatgcctgtaatcccagctgtaatcccaggctgagttatgagaatcacttgaacatgggaggcggaggttgcagtgagccgagatcacgccgctgcactccagctttggtaagcctcggtaacagagtgagactctgtctcaaaaaaaagaaagaaaaaacgtgtagaaagaaagagaggatctgattaagctcacaggaacattgcttctcaaattttaatgtgcatacaaattgtctgggaatcttgttaaaatccagattatgagccagtgggtctaaaatgagacatgatgttctgcatttctaacaggtgatgctaatgctgctaatctgtggaccaaccacactttgagaaggaaggaagtagactattatatttactcattcacttgttccatgataactcttaaaacagactggtgactttaatacaattcagagcaccaaataaagattgtcatatgccttatttttaacctatcgtcttatatcaaaattatctgataaacttcccaagtgtgcatatatattgtcattttaaataggtttcaataaaatgaagattcgtgagtaagaatataggaataaatgacattaaaatctttctttataatttatatttctactttcttttgaaagaatttgtagtggcttaaacataagagcacaagatgagccagtgacaggaaaaaccaagtgcatctgacatcttagcttattaggtctagaagacaacctccattacttggtagcaagcggctgggaatattggtgttcaaagctgtgctttcctgaaggcaaaaacagcatcaaaatatgaaaagctttttacttctggcatgagtgataaagatgccgatctgagaagcaggtgaaaaaacttagcttatgcttctaaaggctaattttatataagtgttcttgtccagctgttcttggtaagtccagctgctagttgaacaggacaggtggtaatccctgttcagtggctcattatcacccagaggctttgatctggctaatacataatcaatcagcttctgaatattaatattcttcctattttcatttcacttgttttacctaaatttattttccaaagttccagtatgtttttgttttttaataagatttttgatcatttatttattttgacataactaggctcatgatatgccagctggagtttattacacccctgaatcacaaactttttttcttccctctttatctccttacaagatccaaattgcaaaacctaaggataaagttctaattttggaagcacaaaagactgaaactattttagaggagagcgttaatgaaaatcaatatctaaaatcctcattttaagactgtgaaccctatagtctatacttctagtgtcttcagagttgtgatatgcatacattaaggactaagaaacatttttttaaatagtcagatttgggagcattagatatgtttgtagagggaaaaatcaatttatgataaaaattactgacaatggtttaatttgtattagttttgcccacttccctgttatctcagaatggcacctccatggacagtggaatggtcctaacagcctaaatatggtaagctttaaaaacagatggcttggggccattctgcttattatatcattgctttcaatagcataactgttcttctccaatggccctctttgttgtttgcttcattactggcacatttctttaatatgtaatctataacattaacatgaaaatggctctcaaatactattactttctccatctgtgacccagtactgtttatcatcatctaatgatcattcttattgcagatggccctctttaaatgtttcagaatagcattttaaagacattgagggtgcttcctacgtacattggcagactgaatgttttaatatcgaaaatctcggtctacacgatgtgtgataaatgactggagatgcaaggcaccagtcagttccaaagcaaggtgtaagagggacaggaggagagtgataaaaaagaatacatactttgcgtgtgtgggtgtgggtgtgtgtgtgtgtgtgtgtgtgtgtgtgtgtgtgtgtttaagccattagatttatctttaaggaagcattatctttaaggaaagttggagtaggaagaacaaaatttaatcaaaagaaacagttcttggccagaggaggtggctaatgccggttatccgaacactttgggaggctgaggtgggagcattgcttgaggccagcagttcaagacctgcctagtcaaggtagcgagacaccccacctctgccaaaaaaaagaagaagaagaagaagaagaagaagaagaagaagaagaagaagaagaaacagttcgttattgcagttcttaaagaaggagtttgtgtttcctttctgatcattcaccatggcagtgatacaaaggagtgatatcaaattgataaatgagttccctaaggctcaacatatactaaatgcctatgctgaacttccaggtttcaagtccctagagcctctctgtctgaagatcctatcaccaaggattctttgtcttcatctagtactttctttctcctctctctattctttcctcatttgcggatgcttgctggggcctgtcaatcaaacatagatgatccctgacttacaatggttggatttaggatttttttacttgataatgctgcaaaagtgatacacattcagtagaaaccatacttcaggtatccacacaacccctctgtttttcactttcagtacagtattcaataaattacatgagctattcaatgctttagtataaaataggctttgtgttagatgattttgcccaactgtaggctaacgtaagtgttctgagtaagtttaaggtaggctaggctgagctatgatgttgagtagattaggtatgttaaatgcatttttgacttagaatattttcaacttatgatgagtttattggtacataacctcattgtaagttgaagagcatctgtatctgggttggagcagaagtattgctagtaatgcatccatgagtcaactgtttgcttaattggtatgctaccacacatgtcttgagcttgttcatcccatggcttgccattgtgttggaaaggaaggtgttacagcattgccgttaataacatttctaaatgggaccaaaaacagtattttctttatctgctagatctttttattttcttctttctctgtatacgtgagctgttcccaaaatttagcacacatgttttatgattctcaacataacgtttatggtccttaacattaatctcatattagaaaataaatcatgatgaaggtgaaatatagaccaagcaggggcagttatgaggaccaaatcgtcagtataaaacttttataattaatattttcatgaattgatagcacttgcttcagagagctaaactcagaaaaaagagaaatattctaacctgaaaatatatttttaaaaactcataatttaaggtagggggcaagtagatttggccatattttgggctttcttcaccaattcagacacgataatgactacatttgtatcctagatttaaatttgctagatggaaaagaaacacataaatataaaccccatctgcgcaaacaaacataaccattcacattcttatgcaggattctggggtaggggagggctttttttgtattataacatagcatgttaatttttaagataaaatggaaatatttttgtgcttttgttaatttttatgttaaaaatgacattttaggcacctaatcaaattctctgagttctttcactaaagaattttgcctaatatttgattaaattcattattattaaagatcaatggaatttctttcagtttgaaaagttgaaaaaatgagttgacacattgattcatagaaaaagttatgaaatttgagaaaaattattgaaccaattttatttaaaatacatatagatattatgtgtatctgccttcattttcaggataatgaatgtcagtgttaaatgtggaaacattctaaaattggaaatcagactccacttggttcaaagaacaccttattttagataagccttttaaaataatgattgaaatccagtcaatccataccctcacacataatcctcatgcatgatctttgtttttccctatctctcctctaaatgtcctttacaaagatgagaaatgttcttcccaacacaaaattcctttgattgtatattagaaagaactgacactttgcagcaaggtttaggaaaagctaacgtaagtagagcttctctgaaaactgttttaccaaaacatactggatttactgctgttaaataatggatttttttttttttactatttatatttgctcctcattgaaacttgtaaatgactttattagtcttaggcaacacatttcattttgcattggataaagatgcttcttcagtaaagtgttcatttatagcattgagaatcttgaaatataaccggtgtcatcaaagggtaggaaggtagaggcacagagaagtgattaatcacttttccctccaatgaatgatctactgtcaagttcaataatcatatttcatctataaagagcactttgagcaaagcctgttttgcacacgtcattacatttgattacaattaagtataaatatatgcctattatttagctctagttaaaatctgcaaaaatatagaaggcttgtgggtgatgtaaattggagatttgcataggtttagggtacaatattagaaaacactgtagttttatttttgctttatgactaaaaggcactagctatgttatctcgtttgttcaccaaactaaaaaacaacagctaaaaagcaatgtaacaaatttcctctaaccttcttaacccatccactgctgtcgcatgactctcacaaatcagaaataaagaaccatttctctactgaaggtcatcaactcatttgagggccatagatcagtaaaaaataacttagtctgagacattcaaatcacttgctttttaggtaaatattttggcttttaaaatgacacaaatctgaccaaaatgttactcagctttatgggaacgggattcttttctagataatcttagggacgatcttaactcatattgtttttgttcagagactaggtctaatttgttagaagtgctgccatgggatctcattctactcaacaggagtgcattcttcttatccagtatccactaaaagtcactcctcctcccatgaaaagagttgccagtggaaaactcagagaaaacatgggaagggattggtgatgtcatataaggagattagaaaacatttttttaacgtttaaaaagtaaagagatgaattttaaaatttacaaaccaataagtttgatgttgatgagcaacaaaatcctggaaaatgacatcgtactgattattaatgattacataggataacatgctgctgggaatcagcgtgatactctcaaaatctgccatgtcacatgcacctcattttcattttttttatggctgcttgatggttagatgagaagactgttagagacagcataacttaggattttacaccacatttttcaagttctcttttgagaatattgggtacaagataaagaacagtggggctggctaataggctgaatttgaagctgattaaataatgacatctaaagaatgtcaattaatagatctagatcaacacaaaatagagtctctgtcgttggccctgcctttgcacatggctgtttcttcttcagtcatctcttaagctcaactcagccctctgcctgaagacctcatttggccagttttgcccattcattactactgtgaactctcttttgttatttttttcctgttttattctgagaatggattgagctagatatgtggaagttatgggaaagcatattttaactaaatattaaagaaacttttgtaatcgagctctccaaaaaataaaatccgccactttgaaaagcattaaactccctgtacagtagattttcaagactgaaatgactgtctcacccctaaaggcaatttctgtattggatgagaggatataattcattaacctttaaggtcacttgtgaatctaatgttttgatattttcggaattaatcagaagggaactgacagcatgacctgaatctgtcctatatttatgtaaacatcctgtgtgatgcacctcattctttgtgcagttgtatgcatttttgaatgttaaatttgattttagggcaaacgcttttttaaaaaaattttaaaataaactttattaaataaaaatttacacacagtaaactgcctccatttaaagtggttcagcgatttttggcagatgtgtacttgtgaaaccaccactgcagtcaaatgacagaacgttcttactcccccaaaagcctccttgtgcccctttgcaggtcatttttcctttcacccctgattctaggcaaccactgatcgtctttctctcactgtgtattactttgcattttcaagaattttctataaatagaatcatacagtatttttgtatgtatctggtctcttatattcagcataatgattttgtttccagcttgaggatattatgaataagactgctaaaaattgtatacttgtttttctaaataccccttataaaatcttacttttgagaagcatattactaaaataacttcccaggttatatgtgtatttgttctttctgttcatttcagcattatcttattaacaagcaactggaggacatgcaccaaggataaattgactaggtgctaactgaatttgtgagaaaggcctagtttctaacgttctttcttgggagcagatgtgtaacagctacttttgctgtataacagaccaaccccaaaacttactggcttaacactgaggtcagcaaacattttctgtaaaggacaacatagtaaacactataggctttgtggagcactttgcatctttgttgcacattctttttctttttacaactctaaaaatgtagtcatacttagctgagaggctgtacagaagcaggccatagaccaaatttgaacaatagttcataaactctataacacaatggccagccatttacttagctcactatttgatgggtggattgggccatttatgtggtgtgaccagttgtactactgtttgccaggcatgcttatgcatctgtagtcagctggcagctggataagctatcgtgacctgactcatatgtctgatggttgacaggctgtcatctaggaacagatgcaactaggtttgtgtgtatctcatcatccaacatgctagttcaggctagttcacatggaaacttctcaggtttctgcttgtgtcatgtttggtagtgtccattagccgaagcaagtcatgtcatagggccatcccagatgtaaggagtggggaaagactccacctgttggtgggaagagatacaaaggcacactgcaagagctggacaccaaggagagggctagaacttttggccatgttgcaagatatcacaaaatattcaagaaaagttacaggaaggttcctctgtggactaaattctcttctgaatttagatgtaggtaaaatggagtgtgctgttaaaattcatgctttgtgagtaatcattgctaggctaaactgtttgtggcttcacagccaatggtagacatacagcatccataatctagtgcttttaaaaatataagaaatactgattacaaacatagttaaccacttattagtactgggaatttaatgaaagctgctgtgattaaatactgaaaaaagaaagattgtgggtttccttctggtaactttcaaagctggtcactcttttgaaaggaattttattcttaaagctgttatttttactcataatatgcttaatacccccatggctgcagactgtctaaaatgttcctacaattatatgagaatacttttaaaaatcatgataattatcagtcttcatggacacttattcagattaatttccccaagcacttaataggatgaatttataagcattaaatagaatggggaccatccagccctaaaatgtgaccattctgtcaggcacacacttgccaatttgttggcgtggacctgagcacactagcaaggactttgaattaggtctcactgcaagatggaagcagaagggcatttctcagtttatgttttgaagtgttttgttcagacaggcaacgtgcagttgtgtatagtagtgtgagctacctgttactccccttaacaatacttttagcagcaatgtttttcctcctgcaatgtgacaatatcaccatgccatttggaagaaaacaaaaaggctgagtgattcctggtatactcccaaacagccacccaaacgaacagctggcagagaagacaccccctaaaacttggagcagattctcagcccctgcagcatctcatgtggttagaacttcagacttgatgaacgcctccccaacttgctccccctcctgaatcttttaatcctcctccagtctcttgtaatgttccagcccttaccagggaataagactgcaaactgtcttccgtcaacttctttccaaatcctagtctagagaaattataatgatgcatgattgtccagtgggcatgtatagtttgtccatttctttatgtagtaaagcctgtagctttcatcttttttgccaatccactataaaaattaattttatatgtcatcctggtacacacacacacgcacacacgcatctatatctgtaaatctttttctgtctattcatgcttgtatgattgaaagaaaagtttcacaaaacattacttacccataccaaatagtacactttcatattttttttttttttttaatttcaacttctattttagatacaggaggtacatgtacaggtttgttacatgggaacattgcatgatgctaaggtgtggggctcatgacctgttacccagattgtgagcatagtacccaataggtagttttataacccattttccccactccaacctctacactgtcatattttctattcttttctgtttcattaagaacaatactggtaatgatccactatatagatttcatgacgtactaagggttcatgacctgcagtttgaaaaacactgtagttagttttatctccacctcaggccaggtcatcagaaagctgcattcttagaccactttgccttggcccccataagattgcctcaactcaggtgtacctcggcatcatgttcctggcttatgtcgaggggcactgaaaactgctgaagggatttttctgaaagtcgacaccatgcagtgtctcccaccttagatcccatgcagatctgtttattcaatctaagtcattccagacttggattttcctttgtttcacttacactctttcctccttatcaataatccaaataataaaatcgatcatatttccttttatattttttcttttgctttgacatctacaaaggccacaaccaaattatacccaccttttaaaacacttttttactgaaatatattaggcatgtagaaaataagggagatgctggttaaaggatatgaaacttcggttaggaggaataagttcaagagctctattgtacaccatggtgactataggtaatgaaaatctagtatagtcttgaaaattgctaagagagtagatttaagtattatcaccataagaaatgataagtatatgaggtaatgcatatgttacttagcttggtttagccattccacagtgtatacatatttcaaaacatgttatacatgataaagatatacaatttttatttgtcaattaaaaaaaaagaaaaaatggcttaaacttatacagttcagtgaattttcacaatctgaacacactcatttaaccagcatccaaataaagaaacagaacattaccaacctttagaaggccctttgtgtgcccttctgatagttacctgtcctccaagggtaaccacaatcttgattttgaacaccattaaatattctggcctgttcttgtcctttatataaatgaaattgcacagcatgtactcttttgtgtctgacttctttaaacctggattcatccatgctgttgtatgaagtggtggattgttcattctaattgctatgtaatatcccattgtgtcaatatcctgcagtatattatatactctactgtggatgggcatttggtagaaaaaaatgatgttataaacattctaagacatgccatttgatgaatatatgtatgcattcctttgaggactatatcaaggggtagaatttctgggttatagggtctgtgtgtgttcagcttctgtacattcttccaaacagttttccaatgtggttgtaccagtttgcactcctactaacagagcatgagagttgtagttgctccacatcctttctaaccctgtgttgtttgtcttgctcattctggtgggtatgcatagcaaaattttcataaccacatcatgcactgtgatcttcaaagctgtgttctggctgggcatggtggctcacacctgtaatccctacactttgggaggccaaggtgggctgatcactagaggtcaggagttcgacaccagcccggccaacatggtgaaaccccgtctctaccaaaaatacaaaaaaattagccgggcgtggtggcaggcacctgtaatcccagctacttgggaggctgaggcacgagaattgcttgaagctgggaggcagagtttgcagtgagccgagatcgtgccactgctctccgacctgggtgacagagtgagactccgtctcaaaacaaaaaacaaaaaacaaatctgtgttctaaattttcctcgcttcttaaagttttatgctatttatatttccttagtgctgggttttattaatttttaagagttatacattgttataagttgccctaaagcctttacagaacaatgcacagtataaatatgtacatagtatatacacaaatatgaatccatgaatgcacagctaatagggccattatcaaaaatcctacacttttccttttcctctagccctcacattcaattggctcaaaagtagcattgattttattctataacctgtcatgaattcagcctctccacaaattcccagtgctcctttcttagttcagactttcatccactcttaactgggctgttgtcatcatctacttggcatacatttccattctgatccctaccctcttttccacccttgtttcttcccacctcaaatttaattctattttaaaaagaaagatattcaaaagtacaggtggtgccaattttttcttctctatccatcatatgcaaagaggcttccaattctttgtcgacctgtttctaagggatgagagtaggtcaagctgtgaggacttcaattcccacgtgaaggtcttgttcatattaactcaataatgtgctttgatgtcctaatggggaaagtagtattttctgccagttagccttcccaagatatcaaatccaatattggccaaatacatttttgaattcctaaaaagcctaaactgatgtcgtaacacagctgtatattaacataaaaactctgtaccttagtaaattattaatatgagcgattagctcacagagtcaatgtaagaaacttgtttcaactcttcatattctagcaaaaagaacacacacacacacacacacacacacacacacacacacacacaaaacctgatttaagaactaactaggtgattaaagcctacttagtttttaattgaagtgcatattctctaatcccaagaggccaaactaatcacctttccctttttgctgctttttttctctctatttctgtaattattataatctgtctgatactgtgtttagctatatatgggtctatcttctctcattagatcataagctccttaaggaaaaggccatatttccttgggatcccacttaaaaaaaaactggattacaatgttgaaatttttatatatttccatgtcattctccaaacactccccagtttttaccaaccataaagaaaaaatgagaagagtttaaatgataagcaaatacatatgtaagtgttccataaatacactatgtttgaagttatttaaagaacttaatataggataatatttaatagagaaacttagtctagatagagcacataaaaaacattcttggaaatttgtggataaataaaagttccttgcatctgtattttcctttcatcttgaaaacatgccttgacaaaagtaagccagagctggagtacaagattcagacattggtagatcattaattggttaaactggattttatcttatttccccttttatggatccctgtctttgtgtggaattcctgccacttgctggctgttcaaggcttgccaccaggagactttctccatcaagctaggggatatttctccctcactgtcccccaccaaatcaatattcacttgctctctgactactccaggtttctgctgtctgagaatatgaacatggatataccttttaacatgcgtgaatactattcatattttaatctcggccccactgaatgatagcaaacgctgtgaattttatgcctatctcaggctacagctagtgccttatcttgcacacacacaaaaaaaatcttacttttcctacttgcttccttcttaagtgtaaaaagcaaaaagaggaaaggtgccttttgtaaactgctaaagagcagtttacagaagagcagtttactaaactcagacctctcattttccctcacacgacaatctaaaacagaatgttaaagtgaatttatttggttctgtatacctaactattcctgaacatactgagttctcttttaagaaatcatacctgcctgacaggctgctttgcatgaacacagcattccccagccttcaaattgctgtcagagccgttgtgtcattttgacccacaatatggcagtattatccacattctatagatgagttaacaaaagcttccaagtggttaagtgacttgcctgtaaagggttaagtgacccacctctaaggggtagaattggtctggacactctgcccctctatcttcatgcctttgctataatacacagctacgcttgctgaagattaaggaagctgcttttgataaagcgtgattcttgtagatattcatctcaggaaaaaaaaaaagaaaaacgctggtgtcttcatctgtagcatttgattattacattttccttatctgtttcaacttaggatgacttccttgttcgcttaattgactggtaattcctttgtttacttttttccaaatctcaagaagcaagtctagagtattaacaatggttacattagcatttaaaatttttttttgaaatttgagtatttcagaaaggggtaatttaggcaggcatgtatgtagaactttgcattttaattaaaaagactcaaaatgaaatgaacctctgacagtaacagatgactacttctaaaagctgcattactacttgatatatgctcagtattttcttgtgggtaagtcctacgacttgtttcaagaaaagtgacaggactaaaacaattaaaaaagacaaagctgctgttttttaatcatatgttcataaataaaactaggttgtgaattgtttccagagaagcaattgacaaagtatgagtaaatcactctaagaactaaagctgcgttgattttttttaatgttcaaccaaacatctatccttgtccaatgatgaattttctttgacaaataaatatttacaaagtatgaaatatagactctgtgcctttcctaaggccaaagcatactgtttaaactaaaatttaattttttttctcacctcaaatacaccaaaataagaacataactaaaaattaattctctcttgtagtagactgtccattaatcttttgttagataatattagcattgtgagtgtcaggtagaaagaaaaactgtaatttctagattgatcagaaaatgtgagtatttatggatttgaagaaaacaataaagtctgataaaatagaattttctgtaacctcccttatggagtcaagaaggaggaatctttcaacatcctcccattttgcagtgaaaagtcttcatgcagtaaatagtttgcttgggtagatcaaagggttaatttacttctgatttgagaagagacgcagacttccctgatttttttacaaaaatgtgttgtgtgggaggaaggtagaggcctcagaatgaattcactaattggggttttcacctgctgtgagtctaatcgaatacaaagccttatttgtagctgaagaggaagagagattatgcagagtgtaagaatttctgcccagttttgaaattccgcttatttggcacaatcggtggggaaaggcagacaaatagttacaagtttgagctgttaaggtagaccaggaatgctgtagtcagatatacttgaaccacattaaccagtgatccatttttagcaggaggtggtgtgggtcatatacatgggttatcgctatagctggcaggctaataggtactccaaattctttcccatgaagcaaccgtcggcctgtgaggttaatgaagtatggctttattttagtgaagatgctaaaattcacatctttttagatgttcggcttgatataggtggctctgtgaagctttgagaaatcttattaaaagaaaactgtgtgagagtgaagcagagctcgactttatctggaacctgtctggtgaaatctctggtttagatggcagctggctcacagagaactttcctgagtctggcttactctgcctccctaaagagacagggcctggaaaaataggcttttgtgtgggtgtgaagtgctctgtgtctgaacttagaggcctcttcatttgctggttaatgtgacctggctggatattcttacatccagaagatgttggtttcagattgatctagggggattgttatatatatatttcaattagtatgctataatatttgccctaaccagcaatgattcaccatacaccaacccatttgttagatgtctgagtcactgttcatggttagtacttgtactatgcaaagaggaatatggaattcttatgtctttattgtatacccaaatgctgacattttactatagaatatgtattcgagttaattgaagtgatacctatactctaaatgaatttttataaagtgatgcaggttatactaaaacttagggcgcactatagatagagagaagctgaaccctaggagttggtgaagtctctcgggaccatccctccaggcaagtacccagttcaaaccattccttgtctttgtcctttcctatgccactctgcatttttacacagctagcatcaggccaacattgaaaccacatgcaacccagaaaggaaaaagatgtgtttgtggaaggtaggaacagcctagtttcagctgttggcccttcacagcctccactagatgggctcattcgaacccaagacccttccaacagtacactgcaaatccatagctccaattcagacatcttccctctgagctcaagactcagatgtccaactgtctcttggatacctgcacttttacatcaccacctccaattcattatgttcaagactggattcatcatctctttcctaaccctcttctgccccctcctcctgaaattcctagctcggagaatgctactcatccaatctttgttgtcactcaaggacaatggtccttaaccttcactgcatattagaatcacttggagagtcttagaaatcctaatgtccaagaccaattaaattagaatctcagggtggtgagacccaaacatctaaatttattaacaatccctgagtgattccaaagggcggccaagcttgaggactattgctttacttcttccctctcttccattcatacatccagtcagtcaagactcctgtagttggaaccttattgtatcatttctccacctcctctgccactgctgtaattcagatcctcctcatactgcaatctccttgtacctgatgtctgaatttcagactcttgtcttctgatcaagcccccataccattgcctgagtgatttttctaaaagacaaaccggacagagccacactcatgctttaattctttcttccttaaaaagctccctcatacctttcaggatacaagtcaaactccagattgtcacactaagccctttccagtttgcccatttctctaacccttatcttgacattctctccaaaagatcaagcagaccgttgaagctcttgtaaagaacaagctggttgcatcctttttaccctcacatctgctgttgtcaccatcataattgttgatatgcctttaccctcaaaaggccagaagctctttgtgggcctacagaggaggcttctctgaatatttatccaatgactgagtctcatctgctttttagccccagagtggggggatctgactttctcctctatcagtagtccccactcagcatcaagtctattgccccagagggtggctttggctggatgggtctcagtttggtcagggtcctgggagaaacagatggtacattcaaacggaacacttgaagagagtataatgaaaaggctatttacaaggctctaggcaggctaggagaaaaaaaaaaaaacaaggaatggtaaacttttgcccaaagggataaagggaggaatggtttgcgtaactggtggaatgctattgctgtaggaaaggactggccaacaagacttgtggctgcaggtcaaggaactcagcagctgccaggccagagatcagtaggagggaacctgaagaataaatacccaaacatcaccttcctcctgtcctttcctctccttctgtaggcctttcatcactgcctcccaattggctgaaagcaaaaggaagccaaacggcaggaaagcctgattgatgtccccacagaggtccaacctcctgggccacagagcagaatggagaaggacaaagaatagagatggatgggagaatggggaagcatcctgcacagtcccttaggtcagagatgcccttattctctaaagataccctcaaagtttaagtggttcaaagaccagagttttggctacgggaaaatgtactgggtcgccttctttgacctcatcccatttcatttcttctttatctctatttctagcaaatttactcttctctgctctgagccatcagtgagattgtctatgagtatactagaaaaaacacagacctttctcacaggaaaagaagccatgtctcttcatggcagcatagcagaatagctaagcgcatgagtcttcgagctggattccccaattccaatccttgcaccattctagacagtggtactgggaacaagtaggtcatggctgattctgaagtcaaaattttagctgaagtttgttctggtagcagagcttcaggctcttttcatgtccgtggttcatatcaaaacagtaataataataataataatataatcagaaggaggagaagaagaaacatctactataaacaaacaatatattatcatacatggcatcactacataatttacatatgacacgaaggtatatcaattatgttcttttccaaatgctttcctctaataagcaaaattcataatctgactgcaattgaacaacaaaacagtctctgtgatgcccgcgtcatttcttaatactttcagtatttaattataatatgacgtcaagatttgggaacaagtcttcaagtgcctataactccagtctaaaaaagaacttaaagatgtatttttgaggattgccatctgtcaatttttttaaaaagtctgaatagtgatttcttattccattcttttttcttgtcaacagattattcttagtagttttctaattggacactgagaaaagagacttaagcatttatagagaagcgtgtcagaactcctgaattttgagcaggtaatttaaaagtgtaaaacaaacaaacaaaaaacaggaaaggaagagagtgacaaatgtcttactatccaggtgttacaaatccttagtttatcgatttgtaatatttacaaatgtccatgctctgaggcttctgtcttttcgttgaaataaacataaacagtagttaagtgatttgccacactgacacagagattggtgtctctgatttactgcaaagggcactacttcctcattacaggacactaatccctcttccccaaggatcggagcagacctagaatatactattagaccaagggacaacttcagccaaagcaaatcttagtgtgcccccctcagaccgtaatagcagctgcctccacaactcactagcttaaaattgctaaagggcaacactaagtaatctcagtgtatgagccagaatgccagaagaagtgccatatttgcttaaaaatagcaataccgatcatacttacatgcacatatctttagtgataacatttacctttatatttggtttgttaaaggtaataaagaatcctggcattcccttttgcttttgtccagatactttatttttgcctcttttgccatgctatagcattagataaagcaaaacgggtgtgcttccacctaaaacattctagggggaaaaatgttgagcagaaaaggattatttcaaaagaagccggatatggtggcatgcacctgtcatcgcaggcacttggaggctgaagtgggaggattgcttgagcccaggagttgggagaccagcctgggcaacacagtgagacccccatcccttaagaaataaattttaaaaaggggaccacatttaaactgtagaccgaagtggaatgaatcaatcggaaaggagagtggaaagcaaatgtttgaaagaaaataaaaagaaaagcaagccaacaaaataaatggacaaagaagggcagtgaaaatatcactaacagtttatcgtaagatgctctttggatgctaatctaaggtgttatgtgaagtttgcagaaaattcttgtgctaatgaaggctttcttcttcttttgagtatttccaagcttgaaataattgtgtgtagttaacttctatcatcatactgcaaactctaaaattagaattatttgaactgttcaggccctgtaacttttccaataaaatattctattagaaacaagttccttctagatcttcctaaaagaatactaaaggaccaaaccgtgcaacagcactggtggtattgtcttaatttagagagtccataccagtgattctcaaacattagtatgctcagagtttctggttcaataggtctgggccgggcccagggaattttcatttctaagaagttcgcaggtgatactgataactgctgttcccagggtctacattttgagatccgctgctatgtcacaaatccaaatccaaagtctttttaacaatcccttttagcccaggatgagcctaacggcaatttcacgtccttatcgccggccactttaatcttcaactgaggaggaagggagagtgagaattatgtatataatttttttcttttattttttaaaaagaaaactccaagcccacactcttaattatctgggatgaggtcatttgcacctgggtcatttatttagacaacaagtagtcttgctagaggctttaaggaggtgttagcagagcggtgtgtggcttccaggttcctgggtctaccttaaatccccatcctctttctttctttctttctttctttctttctcttttctttttcctttccgttttgaaagccccaactgcccagtctctgggtgtccgggttcccaggtccctaggtgggggcggagcccgacacggccccgccccgtctgcccgcagcgccccctccccggcccgcccgcgccggctcctccgcagtgctttcagctgtgagcttgggcggcggcggcggcggcgctccactttcggggagcccggcggctctgggaagctcactcctccactcgtacccacactcgaccgcggagcccttgcagccatgagggaacagctcaaagggtaagtggatcgcggccccggccccgtctgatggccgcaatccgtgcacttgtggcgcgagcagggggcaagctgaggcggtcaaaacttggacaggcgcggcggctggacccggggcgccgggcggctgggcgtctaggaacctctcccgcgggttcccgcggcgcggctgcaggtgcgcccccggggtttctccccaggcgccgggctagtgggggaacctcttccctcggctttgggacgggctcggagagaaaaagctgatttctccccgtccccagaggggataacgcgttcctcacgcggggattggggccgggggagcttttcactcctttccaggctgccagtgtggacgtgagcaaggctggctgttcctaaatcgtcgctcttactcgtagaaggaaggggcgcacgcggcgctaccttccattgcactgcaagtgccaaaaggtcaactttctgcctgatttcttccgaggattccaactgacatttccctcgctgcattttctaccgtgctcattccatgccccaagacctgcagaaatcaggaaagaaagaacaaacaactaaagcccagaagtcaaagatttcagggggtggggatttttgtttgtttgggcttttttttttttttttttttttttgcccttcgggattgggtgtggagtcatttctagggtgttctctcgcatttctccaggtgtctgtgctcatcttcaagcaaagtttgtcactcccaatcccagcacggcaataaaaagggcagaacactttgcttatattagtcaaatttgaagttaagtttgaagctttaaattgaaggggtttagttgctcgagggaggcataatattaattataaactgtttttacatcatgaaaaaaatccatccgatttaagtggtgaacttttaagtggcgtctttaagtgaaatctacatttttccttgggcaataaactcttcttggtcttctgctttatccctgtcatctctccttgtcacccaccccccccccccccacacccccaatcaacctttctttttttgcctagcttttttattgccttttactcaagcccctctttggaggatacatttgctgttggagaagcgagtggagcaaatgaagcaacacggttatatgaaaggtctctgacccttgaacaccgtggaattggtttcagtcatcattgtttgatctccgattggacacgaccctgaaaagaaattgctttgaccaaagttgagggtgggtaggagttaaaccttgaaaagcaaataaaacggaggacaactaacagctggaacagccaccgaggcaatcatctttgccctggctttagccagacagaataaaatggtaaatatcccagggaacaagaaatggggaactagaatggatttctgatgcttatattgatgcccacccctccaaacccctgccccacggtagcagaaactttaaaatatattttaccatccacaccctgccagtattccagcaatgcaagccaagttcaacaattcagcacgcaaatgccaaggttcctctagaaaaagagtctgatcctcagattaaagggaaatcatttgtgtgtgtggatcaatgggctccagattatatatgaaaccaaactctaatcctctgcaaatcgcaagagaacgctccctttttatattgctgcatagcgattagttttctccctgggaagtagtggacagatagttttttaaaaaggcaactgtttggaatattttcagtaccaaataacaatggtggcagaagaaatcttattttaattaggcaactgccattttcccagccacagcagtagatatttgttactttttataagtgtttaatgtttgtttttaagaaactaaaaaagcaattccaataagtctgattattccagcactgacagcaggaacagctctgaggcagttataataaccttgcacactacttgaaactaaagcaggtgagagaaaatttaaattgtatggtaggaaattaggtcagccttgtgctcagtagagtaatgctttaatttcttattattgacaagtaggtgttgctggggtcttttgtcatagtcgatgactttatattttaatttgcatcagggtcctatcaccgcctcaaataaaagggaaaaagattatcatggtttgtagaaagaagaaggagaggggaaatcttcgtataaatactgctcagagaggcatatctgatgccaggctttggaaccagcagggccaaaatcaataacattttttaaagatgtaaagagcgttttaaggattatttatgaagctgatctctgtgttaatgtacgtacagacttgtgatctatgttgaacattgttgttctcagaaaggccaaacaaagatgtacccattaacatgtgaacaggtttcagaatttcccttttggttgttcatggtatatggggagtgtatttccgatgtggagagtgaaatgcagaaaagagacaattaccaaaacagtgccacccacccttccactccctcctccctagcacaccgtgtttttctatatcgtctgcatattccaggtaaatgtgggctcttctcatggagttactgagaattctctactgttttagaaggcaggcacagagtaagaaacgaagctgtaaaatcggtattgatcacagacaaaaatgtggtttgtccttcaaggtacaagatagatatgagttatgcagatttgtgcttacagtttcatccagtccatattcatagttcctatctattttggagggttaaatgtgtcccagtggggctctggattcatcacaggtagaaaataacaagccgtgaagtgaatatttggttcgtcatatagttaccaaagaatctgaaggttttttggctacgttgccaagcatttttagcattaaatgattaaaagactatttttctcgttttaagaattagtcacaccctttattcttttcttctttccacttgtgctcacttcttttgcttagaactgatttgcaattgaagtgaaactaagactgcaaaggtgaaatctaaatctgtttttctagttcttttgcattgcttagaaataaaaggtttgtgtgttgaaggtgagaaaggttagcttctggaattgtttgaggagttcatttatctatgttattcaagtcccccagaatcacagataactgggagaatagtacctatcaaggactagtatcttaactcacaaatgggcaatggaattgggggcttagaatttcctccttcttccagtaaaggagattttcagttttgccgaggactgatggattaaaaaaaaataatttctaaaacccttttcataattttaaccttcaaaataaattctttaaaaaggcaggaatgtatgtatgccaacagtcatgaaatttctttagaagatggggagctccatgaagccctcattcattctatgtgggattctcctgtaaattgtacacactgtttccctttccttttagaactgtgtttggtacaggtttatttcttgcctatgttcctctaatttgaagtccattccagatggtggcttttcaccgtggttccctgtctctgtctgatcaggcttatcagctcagctaaatgtttttctgcagacctatagaagatgctacggtccttacaaatatcctggagatgggacattgttgttacacagtgtgactagtaagggcctgtgtgagcccttgtacatgtgggcacacatgtgtgtgcttcctctcttcgctcttcctttctccctggtgcttatatcacatctggatgacctttggaaatagaggaggcctgaatgcagggtggtctcaatagaaggtaacctttccttgctctgcacttatatatggaattggtatacactcactttccgagctgagaaatgcctgagaacaagcaacactttttccacgaagctgcaagctgcagcctccttgtgctgtgcatgtaaagtaccagtcctgcctaccccttctccagatcataaaccggcttggtcatggggtgtcctaaaaccccttaaagcatagagaccatatctcctgctcttcttgctctttaagacttgaatgtcactctgttatattccctcaactgataagcccttgttatagtcctcaaatgtgagttgtctctatggaaaagtaaaactgaaataaacgtatttggaagacagtgaaacagcacttcacaagtgaacattttcttgcaaattgatttcagtagccctcactgttcaatcactgactagtaaatattacagggatggtctttgaagttgtacagtttggatgatttccatatgtctttatgaggtttatgattgtgttccatttcttaaaccaacttaaacggttgttttaacttattttttttaaacataggtgataacatgtagtgtgttggttttgctctctaggaagggtctttcttcgccttgattgacttaattacagttggatccacatctatattgtaatcaactaataacagatttgcttttaatagatgacaatttgaggggcacatgataccaaaagcgaccacatattgagcaccaaatggtgccggtcacttacctatttcaactaatcctttaaccctccaaggtaggcaggcttgctttaaatttcaccgccagtagggcgcagagccctaaaattcaaaacatacgctaaggccattcgacattgttgcctctccagactcctctttctgtgtgaggcccctgtactttctggtcctctggaaatgccccagtttaagcgatttctcttttttccttccctccccttcccctcaaaagtttatgaataggctctgcatatgagtacccaaatatcattcagaactgcattttactgtatcaaagcctgtcatgcaatccctgaaaactggaaatatgacgctatggtgatttatgtagatgggccaaagtaaggaaaagtatatgtagttatttctccagggtttattcatgtaattgaatgaggaacaaaggtgttttgttctttttgtggcaggagctgatagccagcaaccacacttcaagaaatggaagacagctgtgaatgcttcattcaggcccaagtaaatataggaagaggtgtagtggtgtatagcgtactgcgtttaaagaaaaaacactctgaaataatgggaagaaggaagttatgatatattagtcaggcagtagatataccttaagctgaaatgaaatacaggtatcatggatatgagatctgtatatgtagaggaaagagtaatggaaaaatgtcaggggcagtgaaagcaaatgagaagtgagatgatttatatttattgaactaatgtccggtatctctttgacagagttgaataataatcagttgtcggtgtcctttctgtagtgttccacattggatgggtgaagaagtcctgatagtcgattattgatcacataacaaggtcaatttatcataactgaagtgcgatcgatttgtgggtgcaaagaagaaacaaattctggaaccgaataatgtttatattgcttttctctttggaaacaaagcagaaaggggcctttctgcttgtaagataaacatttcttcaatacactatggaagcgctttgaaataaagattccgaatggttcaaaagcaaaaatcatgttgttgttattgttgttttcttttttcctgttttcttgactactcattgtaaatgctaaagtctttctttatgttttgtgttttagccacgagactcaaacaacttgctgggaccatcccaaaatgacagagctctaccagtctttaggtaaggacatggccatgtttcctccaagttaaatgacaggtgacctttaggataaagtagtttgcagtgtgaaagttacttgctatataaatacatcactagattgtttcaagggtgaaagcagtggcaccttcctatccaaaattgacagtcagctttctttttatcagaggttccttaaaaacaagttttagaagttgattgattcctaaaaattcaatatacctgagagggcctataggtctttgtagttctctttggtgcctaaaatgatggaaaaacagttgcaatttatggctatttttttttttcttcccacgaagatagaaaactgtttcaggtgcttgttgatttcttccgtgtgaaaccaagacaacccttttgccaaaccacaaatgttgtgtaaaggaattttctgccgtctttccggtgctcacaattcctaaggcctggcgggtcattaatgtgaacatttaaatgatttctttagtatggcttgttttgtgtttatgtaagagcctgacagttctgttttctttcccctcataacttgaattattttgaatgggtacagagcatacaaataagggtttgaaaacaccagtctttttacactggacaaatgtccagatgtctggtttgtcgttttagatctacaaggaatattctgaaatgagttatcttaagttgcagcttgttttgggttttgttttgggacagggtcttgctctgtctcccaggctggagtgcagtggtgcggttatagcttattgcagcctcgaacccctgggctcatggcggttcttctgcctcagcctcctgagtagctgggacaacaggaatgcaccaccacacccagctcatttttaaaatttatttttatttatttttgtagagatgggtctcactatgttgcccaggctgtgtttttatgtatttttttaatataaaaacgtcatgtcttttctactttttcaagcctgcatttctgtgaatggacatattgatagaaaaacacataaggcgatctctttggatttaaggttatgtgatgaacactgtgggaatcagggtacttaaacataaattctgtgtaggtatacgtaagtggggtgtgtgtgtgtcagggggtacgtagctattactgcttttgtgtcatagattctcacaaaatgaattgcagctatagagacaccaaggactagagaagagatattagccaaaaaatggttttattaaacatttttctaattataaatgattaaatgtcttctagaaaacctgaaaaatgtaaataaaaaacatgaaaaaggaaaaacaaagtcacttatactagccagagagatccaatacatttcgagtaatattatgtcatttcagtctggttataagtgtgtaaacgtttaaaattttaaataaaattgggatcagctaattttcaagtgctacatttccagcccctacagaatgtttttggcttataattgtggactgtttataccacaggtggaaaacgtgaatgcttatcttttggcaaatgagagaatgaaaaggcttcatctgaagtgggcagcagctgtcctgggcaagctggtctttctatcccagtactcccaggacccctgattgtacaagagaaaaactagaaatctgtccacaaagagctaatttaaattagtctgtgggcctcctgatcgtaacctgtggtttacacagatttagcccacttctaacatttcctactctaattacagtaatttctagttgtaatattttaattcactcttattttaaaatcattattattatagaattaatacctattcatatttttgaagtttaaaaatatagacaggctaacaataaagaagagacaaatcattcgtaaccccacttcttagagttagctggtgtttaatagtctaggatcttcaaaaatgtctttctatacatatatttttatagaagttgaatcattctgtcttataacttgctttttttttttccactggaaagtaatgtattaccatggccatatttccattttgttgtatagtattctctaccactttcaattactctgtaatgagaaattgcaaacatgtttgatgaaaagctaattatggactatcaatgaatacatgtttgctcctttaatacaaattaaatatacatttaatcattatatttctaaaattttctccatactttagatgtggtgataaactcaaaactgataatctctcatgacttgtgacattgggcttgtgacatcactcaattttgaattataacagaattttacagttgcaggggattttagaactcatttattgcaaactttctcttttatgaaatcaactttcaggtataatttttatataataaaaggaagtcatcgtaagtgtgtgatcaattccagccccctttgaaattctgtttcttgctagcccaataacaaaccacttgcaagtgaactaagtgttgaagtttgcttttcacctttcagagttaatatttccaatagttttgtaacaatcaaacattcgttgggcttttatccaagtggtgattcatcagataacatctcccatttattgcgggcctattgtatgttttccacatgggatgtgccagcaaccaacctgcatggtggatggtatcaacatccacatttcacaggacagcgaagccaggctcagggaggaattgatcagggctacacagctatgtggggctacacctggatttgtcctcagttttctgttagtactttcactgttctcattgattttatttactaggtaaagtatatttatgttggttactacatacctgctacacgtatataggaattgatagttttacctatgaatagtaagttacttgagtggtatttctggaaatggtatggtgggtcctaaacaatgggcactcctttcactgttgcctggcacatatagaatgattgttatatggctacatccttttttgtttgtttgttttttgagacagattctcactctgtcacccaggctggaatgcagtggcacgatcttggctcacggcaacctccgcctccccaggatgaagtgattctcctgcttcagcctcccgagtagctgggattactaggcacccgccaccatacccagctaatttttgtatttttactagggacggggttttgccatgttggctaggctggtctcgaactcctgacctcaggtgatcctcccaccttggcctcccaaattgttaggattacaagcgtaagccacagcgcccagcctgcctacatccttgagatcccatataagattaactaccagcactgcctttccccctctccaaaattacagtgtttcagagtcgaaacataagcataaaatactgaaaagaaacttttcattgattttagtttttacttattagtttatatttttcttcttcaagaggtatccctttaggtccaaattgctctttgagctggatgaaatggtcggaagccttcaactacagtcagttggtgaaaggtatcttgaaagcagaaatggtgttgtggtctggcgtgtcaaatgtttaagaccacatctagccccctctcctaatcgaacctgaacctcatgtctctggtgaggtgctgaaaatatcaagatgttgctttttccctctgtacccccactccaggcatactctaccgtggaagctacagtggttcacagtatgcatggtaggttacacattcctagagacgcccacttctaaggagatttccattctctaatttgccaaagttcccaagcagcctgttcaacacatgtttatgttacctgccttgccctcaaaagcattcaggtgttcccctgcacccagggtttgaacacaataggattagaaggtgaaaacattttgttagaactgaaaaagtagcaagtatttactgatgaaaagctataatattgcttgagatattaccattggagctctctaatacattctgggtggttttctttttcattccttttccactgattttctacaatgaatttatattatttacagttagatgtttggtaaaaaagtttcttcgtcgatacccccattccatttcttacttagtgtctctatagctacaattcattaactaatgagaacttatgacagaaaagcagcagtagccacacacacacacacacacacacacacacacgccccacatatatgtagataatttatacttaaggaccctgattctcatggactttgtcaggtaactttaaactcaaagagatcatctcatgtatttttagtctgtatgtccagttgtgaaaaatgcagatgtagacattttagtggtagagaaaatagaacttttttgattaaaaaatagataaaaaacaatataagataattaattttagattatttccaacagatctaaaatggctttgcagaggaggtttccatcaagtgttagaaatattgtgtttccctcatttatcggctgtgtacctacacaaaaaattgagagaaaatattgccagagtcctacacaaacaaagcaagacatagtaaagaaataatttaaaggttcactatgatgactgaacagtcattaggaatttgagtccccagaaaattttttacatcacattaatggtttgacaaaagcattgtcttggattttcacagggaataaatcactaaaagcaactggaaatcagttttctttcagcatttgtctgtgactacccccaatagtcatagaatggtagtagagaatagtagtggagtaagtgggatataagagaccaagtgtctcatgtctattttttgtagaccttggtgctttatctttaaaatgtgaggatattggggctgggcacggtggctcacgcctgtaatcccagcactttgggaggtcgaggtgggcggatcacctgagtcaggagatcaagaccttcctggctaacatggtgaaaccccatctttactaaaaaaacaaaaaattagccaggtgtggtggcacatgcctgtaatcccagctactcaagaggccgaggctgaagaatcacttgaacccaggagtcggaggttgcaatgagctgagatcacgctgtagcactccctcctgggcaacaagagtgaaactccatctcaaaaaaaaaaaaaaaaaaaaaaagtaacgatattggacaagtgtctaagatttttgtttttcttttactttgggctgagggtggggcaggctgtttctaaacttgctgtgatcattatttttcaagaggtacctttcggctaactctgcagacaagtggatttctaaaaatgtaatcattcctatgttttaaaatgtacattctgagaaaacaaacaacaggagaagattatgccacccatccgtgtcttacaggctgagtgaggcaagctgttgtcaaatagagaggctcttgagatatttcccattagactcctctgggtcattcatttgttattgagagggtacattcttcgtcactccctagaagtaataatatgtttgattcatgaggtgagttttagatttctattagcatttttacaaatgtaatggaaagactgttccaataggttagcttggtgatttaaaactctgagctcttcaaggctccagaaagcatttacaacatcagtagatgttagatagtaatatgctctggaatttattttgaaatactaatataatattgatttacatgaagtgcaattatgtggttaaaagcctgtccttttctcacaatttatgtctaggtccctaagttcattactgaaattttaagaaaatattttttaaaaagctcaccctgcccccacacacataatatatgctgcttagagatacttttattggggtttttttttttttttttgacagcatcttgctctgtcacatagactggagtgcagtggcctgatcatggctcactgcagctttgaacacccaggctcaagtgaccctcccacctcagccttccaagtagctgggactatagccgtgtgccaccgtgtctggctaatctttttttaaattttttgtagagatggaggtcttaccatgttgcccagcctggtctcaaactcttgggctcaagcgatcctcccaccttggcctcccacagctctgagatcccaagggtgagccactgcacctggccttcacaatttccaatgtcaaatcttactacaaatttaagtaatcaagagtatttacatatggacagatatactgaccaacagagtagaatttaggctgggcacagtggctcacatttgtaatcctagcacttttggaggccgaggcgagcagctcacttgagctcaggagttcaagaccagcctgggcaacgtggtgaaaccccgtctccccatctctacaaaaaatacaaaaattagccgagcatggtggcatgtgcctgtagtcccagatactcaggaggctgaggtgggagggtcgcttgagcccgggaggacgagactgcagtgagccgaggttacatcactgcactccagcctgggcaacagaacgagaccctgtttaaaaacattatttcttagcctgtcttattgggggggggtctcttaattataaatacaataaaatatgtggttccccaatggttcctttttaaattacaatgtgagtttttttgcatttgtgatactgtcagtatagtacaagaagaccagtttatgaaggagacatgtaggtaaaaataggataatgtgaagagagaatcgctgcacttcagaaagctgattttatttcaagcagtttattaaaatctagatgcaccgtatgttctggtgttacttattccaatttccttttccttcattgaagccctcttaaccacaagtgttttctcaaggggtactggttttccttttcttaagttatagcgttcttcagaaggatctagccctttttaatctgttgcccaatttttggatcctactatccagcatgatgctcacctgaatgatgcgaaagctctcaattttcaaaaatggacttctgagtgtttttggaattcttaggaaaagtggtctttaaaaaccataagatttgaaggcagtctatcagcacgtagcccttagcttcatgtctatggtttgcagagagcttcagaatgttaaaatgagggtttaattttagggtctgctgggcctgaggttaggggtgtgattcttcagcagttctagttaggagaactagttaagtcctagttaagtcaatggggctaaaagctttttaaagatacatcaatatcattataaatcagcaatttgcaagagagttaaaaacactgctatcaaaatccttgtacctctttcctcagcttgcccaagaggaagggatattgtagttatttgttcactctcctcttttgataggctttctacattccattaagtattccctcctgaggatgctcttgggttagaaactgcaggattctgaatgactatgaattccttccttttgcattaggagcttgtcctaatgcttttctcagcatattttgtgaactaaactgttctccactaagctactcaatatttagctttccttggctcttgcttctagttccttaatatattgctcagtgttaaaacctctgccttttgactttttactgccataacgctttgaactggaaaggatagctagattcagatgccagctttggtgtgacctcgggcaagtcccttgctttctattggtcttcattttcttatatgtcatgttggccagtgatctttcatcattaaatgactggttttgttttaacccctggctagagtaaagcttggttgtatgaatgttgtcagccctaaacccccagttcctctttgtcaccaccaacctaaaggatatgaataataggataatcatatttattaatttaattttttttttttgagacggagtctcactctgtcgccaggctggagtgcagttgcacgatctcatctcactgcaacctccaccgcccgcgttcaagcgattctcctgcctcagcagcctcccgccaccatgctcagctaatttttgtatttttagtagagacggggtttcaccatgttggccaggatggtctcgatctcttgacctcatgatccacccgcctcggcctcccagagtgctgagattacaggcgtgagccaccgctcctagcctataatcatatttgtaataattgtactttatttgtgtagcactttacaatggcgaagagttttcagaaataaccatatttaatcctcacacagctatagagtaggtggcatatgacctggattttctatcaatttcagtttcagattttttgtcctgtcatccctttgagtgtccttccagtttttgatttgggaaataatgctaccataccggtggatggggcaacttttcccttctttccatttggacttgagcagactgagactcaagacttgatttgatttatactcactatggtagaagataaggaaccaagtccagaacacacattttacaaactccgagttctctgttctcaaaggaacatccattactcttagcatgatttataaaactgctttatcggcataattaaactggaatccatatgacattctttattccctagctgacaaaattagcacaggagatttactcaaatttgttattaaggctgttataaatgttcttcctttactattcagcttataaaagaaaaaagaaaaataatctgctcttttaactttgattaggatccattgactttccccatttgtaaaatagaaatgtaacttccaaatcaaaatttatggcattttaatggactgttctaaatattataatattttttcttgttcaaataacttgatttaaagcttctaattgaagaacataatagatatttctgaattgcatctctccaagcttatttcagaaggaaactcaaaaagaattgttccttagactttgactggtttacagttttaaaagagctgccaaattgtagtttactgatctaaataagaggaacattaaggttacacctgcagctagaagaaaagtgctggatatgtacaattttatgtagctggatctgcagaagatgatttttgcacacagagtaaaggcatctaaaaacgtgtctgctcttattcagacatttccaatatttcttttttaagcccacaagtctgattacctctgtatgtctcttgggagctgcaattttgctggaaagagattcagaacagtcagagcactcacataaaatagatagtttttaaagtctgtaccctctacggtagtaataaaatgacctaaaaatattctgaaagtctctcttatgacatagtggatgaatcattagcttatttatgaattggtgatattctgtgggaatgtttcaaaatttgctattccacaaagcgttcatcgcttgcataactccaggaaagtcattacaccccctcataaatagaagcttatataacggagacaaatgttgcttatattgatatatttacatacagatttctttaccaagcattaattttggtaagaaagtgattgtttttatattttactttcttggtctgtaaagaggctatcactttaaggccaggcatggtggcacgcacctgtagtcccagcgcttccagaggctgaggcagaaggatcccttgagcccaggaatttgagtccagcctgggcaatatagcaagacgttgtcttagaaaaaaaaaaaaagaagctatcactgaagagcagtgcttctcaaactggtgaagggccaggtttttgttggtggtgggtttttttttttgtttttttgagacagagtcttgctctgttgccaggctggagtgcagtggtgcgattttagctcactgcaaactctgcctcccgggttcaagcgattttcctgcctcagcctcccgagtagctgggattacaggtgtgcaccaccacacccagctaatttttgcatttttagtagagacggggtttcaccatgttggctaggatggtctcgatctcttgacctcatgatctgccagcctccgcctcccaaactgctgggattacaggcgtgaaccactgcacccagccgcggtggtggtttttaacatactacacatcacagatttttaggtggtgctaatgaaactgacaagtatgcattcacaccacatgtaactcaacagtcaagttcaacaacacttgacctcgtctgtaccctgctccatgagatgaattcattgatcatgaatttggatgtcatggcaatgtcaaattgctatagaagttacttaacacactgtccatatctatgcttgtgaaagaccatattttgagtagcactgttctagagcacttaatttttgaaagtataaatgtaaactcaaatcaagtgactcaggtcgggggaggataattaaccaaacaggaacacctgaaaatgttatttatgcggtttaatgttttgccagttgagtcaagttcaggcagaggagggatctattttctttcccacttggtagctctccttagcaattgttttagaagacaaagcatagaaatcattgtgttacaggaaggaaccagagattaagcggcagagccactgctgcctagtttaatgtctctcgcaccccctataattaaatataatgtatataatgtgataagtttaaaatacaggtttgcttttatctagaatataaactgtgatatatgcactctttatggggtgcattcagtgggggaactaattgattatactgtgactttcctattgtcactttatgagtttaggtttggaggcaatgttttgcagcaacaaaattgttcattgactttgaggctggatttaaattctgattctgtcaccagttctctgtggtcaaaaaggaagccactaataattttaaacctcagttatgtgatgtattaaatagttatgatgagacttatcttgtgttgtgaggattagaatgacatatgtaaggtaacagaatgtctgatgtagtaactgctcaaggaattataattgctattagtgatatgcattattattattagttattattatcatataccagtgtctctccttatttaataatctattgggttcctgaattgagataccaagaattcagatagtgagagacacctaggtttaggtcttcacatttgacactcaaggagccactaaatttttctgaagtattttacttcttaaccaaggtgataaagatcacctgatcacaatttatcctaacttttggaaagcatacacgtactttaatttgacatgcaaattaaaataatacattttgtactgtgttgtttgccctcccccaattctaaaataatatatcattcaggataaaaaagactacactttgggaggccgaggcaggtggatcacctgaggtcaggagttcgagaccagcctgggcaacacggtgaaaccccatctctactaaaataaaaatttaaaaaagccagaagtggtggcgtctgcctgtagtaccagatactcgggaagctgaggcaggagaattgcttgaacctgggaggcacgggttgcagtgagccaagatcgcaccactgcacttcagcctgggcaacagagtgagactctgtctcaaaaaagagcataaatatctaataaatgatggtggtactagtctgtggtagtggaggtatcacagaatggctgtagagatgaggagggctaaaactgtgaaaagccttatatggtatgttgaaggttttttatactaaggtttttgatttggaagatgtatcaatcagggtctgcctggtcagaaaacataaaccctctagttatttcaaacaaagggaatttaatgcgggaaattggttactcaagaatggaagtgctgagaagccacacacacagcatgaagtttctgttatacctagggctggagggacaatgacaagaggtggtatcaccagagccccagatgtcatgggcatcaaggcggagttggaacctttggccagctgggaccaatgagggaggggctccgagggagctggagccaggaaggagacacagttagccagacctattgccggaggtagaatgaaaaaggaagtacgcccggcttctcctttccgcctgccctctaggcttctgccagtgactcctattggccaaacttacttggaagccaattggtaagggagcaggaaaatgtactgtaataaacagcagagcagagaaaaggcagagaaagtatcaaaaaccaacaagcaaatgattgaagtacaggagatcccatggacagtaaggcaaccaaccctctatgcagatatttcgggaacaagaaacataaaaaaactaaaaagctttcataggagtttgaggtgacatagataagataccagaaggacatcctgggttcaaaggaaactgatcttaaaggagaggaggtagcaattaaaacaaattatctgcagagaagtccaaacactaaggataagcttccatgcatttgatgaaagtacttgcgacgtttacaggtgtttatgctcatgactctcaagactaaatacagacataccttggagattttgcaggttcagttccagaacacttcagtaaagcaaatatcacaataaagtaagtcacacaagtgttttggttttctagtacatataagttatgtttactctataatgtagtctagtaagtgtgcaacagcattatgtcttaaaaaacaatgtacataccttaatttaaaatactttattgttaaaaaagctaacgatcacctgagccttcagccagtaatgatccttttgctggtggagggtcttgcctcgatgttgatggctgcacagcatggtggttgctgaaggttggggtggctgtggcaatttcttaaaataagacaacaatgaagactgccactcagttgactcttccttttgtgaaagatttctctgtagaatgtgatactatctcatgaaaccacttactttgctcatccataagtagcaactccctatccattaaagtttgatcatgaaattgcagcaattcagccatatcttcacgccccacttgtgatttcaattttcttcctgtttccactacatctgcagttacatcctccactgaagtcttgaacccctgacagtcatccatgagggttggaatcaacgtcttccaaactcctggtaatgttgatattttgacgacctcctatcaatcacaaatgttcttaatggcatcaagaatcacttccagagattttttttttttttttttttgagacacagtcttgctatgttgtccaggctggagtgcagtggcgtgatctaggctcactgcaacctctgccttcctgggttcaagtgattcttctgcctcagcttcccgagtagctgggactacaggcgtgtgccactacgcccggctaatttttgtatttttagtagagacggggtttcaccattttggccaggctggtctcaaactcctgacctcatgatccacctgcctcggcctcccaaagtgctgggattacagccgtgagccaccacacctgacttccagagattttccatttactttgcccagatccatcagaggaatcactgtctatgtcaagctatagccttacaaaatatttctcaactaataagagttgaaagtcacaattttttcttaatccttgggctacagaatggatgttgtgtaagcgggcatgaaaacgtgaatctctttgtacatctccatccaagcttttgggtgacaaggtgcattgtcagtgagcagttatattttgaaaggaaacctattttgaacactaggtcttacagtgagcttgaaatattcagtaaaccatgccgtaaacagatacgctgtcatccaagctttgtttttccatttatacagcacaggcaaagtagatttcacataattccttttttttttttccttccaagacggagtcttgctctgtcacccaggctggagtgcagtggtacgatcttggctcactgcaacctccacctcccgggttcaagcaattctcctgcctcagcctcctgagtagctgggattacaggcgtctgccaccacacctggttaatttttgtatttttagtggagacggggtttcaccatgttggccaggctggtctccaactcctgacctcgtgatctgcccgcctcagcctcccaaagtgctgggattacaggcatgagccactgtgcccggcctgatttcacataattcttaagggccctgtgatttcagaatggtagatgagcattggcttcaacttagtcaccagctgcattaggccctactaagagatacagcctgtccattgaagctttgaaggcagtcattgatttctcctctagagctatgaaagtcctagatagtatcacctttaaatagaaggctgtttcatctatgttgaaaatctgttgttcgttgtagccaccttcatccatgaccttagcttcatctggaaaacttggctgcagcttctgcatcaatgcttgctgcttcatcttgcaccttaatgttatggatatggcttgtttccttaagcttcttgaagcaacctctactagcttccaacttttcttctgcagcttcctcatctcttttagccttcatagaattgaagggagttaaggttttgctctggattaggctttggcttaaagaaatgttgtggctagtttgatcttctattcagagcactcaaactttctccatatcaggaataaggctgttttactttcttatcatttgtgtgctcgcagggtagtacttttaatttccttcattaacttttcctttgcattcacaacttgactgtttggcatgagaggcctagctttcagtctgtctcatctttcaacatgctttcctcactaagctcaatcattaatagcttctgatgtaaagtgacagaggtatggctctttcttcccttgaacacttagaggccattgtagggttattaattaccctgattttaatattgttgtgtctcagaacaggaaggccagaggagagggaaagagatgggggaacagctggtcggtggagcagtcagaacacgtatgacgttgatcaattaagtttgccatcttatgtgggtgtggttagttgcaccccaaaacaatttcagtagtaacatcaacgattactgatcacgattcaccataatagatataaaaataatgacaaatttgaaatattgagggaattttcaaaacgagacacagacccaaagtgagcacatgctgctggaaaaatgtccatagacatgctcaacacaggattgccacaaaccttcagtttgtaaacaatgcaattttcacaaagtgcaatacagcaaagtgcaatttaatgagatgagcctgtaatgagcctctttaaagcaggaactgtcttcctcatctttgtcaccagtgcctggtgcatggtagcctctgaaaaaataattgttcattgaatgaagcacagtagagcaagggagagtgattttgctcgggaggaaaacaaataccactcaagaagatggaaagatacagatgagggttttctaaggcggattattaaactggcaagatggaactctggagagatggagttctttccagaaagtagaagataaagcctcaaagtaattaaaatagggaatatcagttaagttgtagattttattggcaatttgttatcttagcaaaaccaagtgaactgctattctggaattaattttgccctaaaaggaataattaattgataaggagaaataagacccgtaaaaagtgtcactatggattcagaatttatatgacaaagaaaggaaacactgaacacaatttgatgtgctgatggcctcgttcgttcattggtttcctgcttcagtaaacatttaagagcgtgccatgtattttcaaactttagggcaacaggctaaaaatatcaaggagaaaaacgtttactgagggtatagaagtttttatgatcttacttttattgaacattaaaacatggatgttcattctagaaattttagaaggtgaagtgcaaaaacaaaatgaaaatcacctcacatctcagtacccagaaatagccactatttacattttaaaagattgcttccggtcttctttcctatgcatttttatatagttgtttgagataatagaatgtttaaagtgttgtatcctactgtaatcataagtcttctcttattcttagttcctcagagatgttatttttcgctagttgcagtttattggggtaccacttttgtaaaaaaatatttcccaatttttgaaaattgtgacaaagaaaagtcaaattcgtgttgaatttatggaaggaaatctttaagaatctggaggcttattactaacaagcttctgagaagaaagccaagtaaagtgttataataccttctgtccaacaagctacttatgtataagtgatgttacagaataaagtcagtgtggtcaaaaacagacagtcagttatcagaaagttgataagtaacatttatcctatgaaaaatatagctatgaatttaaatcaatagttttctaccacaaatatcttaatggataaaattttctttaccaaatatgtatggtgtcaaggtgacaaggcaagtatccttgtaaactttccgaattacaggaacaactttgcccttcttagcaagcaattttatacagaaactcaactttatgatgggtttctgtaagttttaatttttataataactgatatgtaaatatttagttacctttaacttatctctccaggtagaatggctagcagactgttttatcttctcaaaacatttgtgtgtacagttcccatgttcttttcaaggttcttgcttctaactgtcagttaaggcttttgtagcctcttacttcagttacattttctggccaagacgcaattaaagaatatagagctgataattatttccatagtcgtttccaatttttctactgttccacgtaagactttgaggaacacctttatgcataacacctttctacatttgattcatgtaagtggaatcactgagtcaaatggtgttaatgtttctaagcttcttggaatgcactgcctgaaactttctcaaaaggctgtagccatttacactcataatacttcaaagtgccaatctaaccatgtccttcccagcatggagtattatttttacttttgctattgtaacaaggaaaattaaaccatctcattgttaatatttgtgtattttttatttctagtgaccacaaatgttttcttttaaatatctgctgggtgtttttcttcttttttgagtaatgtgaaaacaaaacgaagttaaccaaacacaactcttccaaacttttctgatataatacacacttttttgtgtgttatgttgaggggctctagttggtaacagcctcctggttacataaatactgtacagtttaattttttttcagctaaataagccttatccctttatccatccttagtggatctattatctacccattaaattaaattttattctctataccaactcctgtttcttcacattttttaaatatatgcagagccctaaattacagtggctgtcctaataaaaggctattcagttattaacagaaaaggaagattgcttcctgcctcttgggtgaggaagactcatgtataccatagatatggtcagtttacatttacagttttctgtgaggcattgatttttttcccccataaatatggagtacttagaatgttcaaaacctttctctgggtaatagaatgcacaaaagtataaggcatgatccctgttcattgcccaagctggcgtgactctggtcatgcagcggacttcatgatgtgatagaattccttgcctatgagagtgaaggagatggtaccaggtctacttgtggccggtggtggaacacttacattattctaagtcctttctgtctgtagaacccaaatgacaaccatattattttatcttctcttattgctagtggtatcgtttattaatgccaacgtatacccattttgcttttcaaggttactttagatgtcttaggttggaatgactgaaggcttatacattcaaatttatatatgacacacacacacacacacacacacacacacacacatatcttattgttgcctgctatctttctacctgttgtataagaaatcctttgaaaaaagcctatgtcagcttcacaaaagatgttactgtgttttgggggaaataaaattgggaagtaataaaacagttaataaatgttacaagaccgtgtacaccaacttaaataagattaaggtcaaacgtatggtaccttatataggtaggaagagcagtattaattagaataattagggagagttgtttggagagtggaaaaaaacattgttctaggaagaaattttgtaatactcaggtaaagtaaaatgtagggccaagatattccagatagtgtagcagcataaacaaaggtatgaaagactggcttgtttgcgagtcagtgaagacattgttctctgagaatctactccagatttttttttttttttttttttttttttttgctttttgagacagggtctcactttgtcgcccaggctggggtgcagtggtgcgaacatggctcactggtgccacaacctcctgggctcaagtgattctcctgcctcagccccccaggcagctgggactacaggcacacaccgccatacctggctaatttttgtatttttggtagagacagggttttgccatgttatccaggctgttctcaactcttgagctcaagccatctgcccatctcggcttcctaaagtgctgggattacaagaatgagccaccgcgcctggccactccagatttttaaaagggaaatctgattcagtgcccctggggtgaactaagtgccttaaattatagagtgagaaatttacattgcatttgattggcaatgggaaaaacattgttaaatcttcagaaaagagaaataatgaagtccgtcttctgtgttttggaataggaatttggtgggtgagtttaaggacagttagagaggggagagattatttcgttttgttttgaggtaattgacatgatgagggtcttaggatagcaatgggggaaggaaaagggaacgtgactccagaggtttttcttaacaaggtagaattgccagaaggtaatcacagattggacaggttttaaagaaaaagggagttatatgtcttcaaaatttgaaggcgtggtgacacagagaatggtgataccattgaggaaaagaggaaattgcaaactgagcggagcaacagggaatagatatgaatttgattgaattacatacttatgggtttatttacaatttctcttcttagaaaaatttatttttggtggctcatataaatgtatgtgctgccataccataagcatatatttctcattaatcctttcaaaaaccctgtaaaagatatttgtatctccattgtgcagatgaggctcagagaaaataggtaattttctcacattgcaaagcagggatttacgtgtacttttaactcctaaaccagcgatttagcccctcagctatactttcttcctgagaggggacagtggcattttgaagaggaaatactctaaagccatttgaaaaggggaaccgaagaaagagtttggtccacagcatgataaaaatattacttgcacttttattatactttataacaagaagtacaggggcagagaaaggttcctaacttttactgagcaagtatatatccaagatacatctcctctttggagcttttgagatacactatctctcttagttttgcaacagccctaggaataggtactattactgttccctttaaaaatgaacaaaaaaaaaatgaagcttaggaaagttaaggttactagaccaagcttattgggagaccatagtgatgaagaggaagggctttagggtcaaatggatttgaattttacttcttaggcctttggtttccttatttataaaatgggattgaaataatgatatcacagttgaaggtaattatatgagaatttatgttatttattgcaaacatagggtaagcacctaataaatgataacctgagaatttatgttatttattgcaaacatagggtaagcacctaataaatgataaccattattactattattttacagcaaagacataaatagagcccattaagttttcttctctacccagtagtttttccattgtacaatagtactctcctgaaggacagcgggtgaagctaagaatttggaagaaatcccagatagagaaatcttgaaaagaagatagatagatttaatactcaatcattaaaaaaagtgcacatgactttaagaaatcaaacattgtaagaggatagtattgaaaagtaagtctccaaccactcttggtatcaatcccctaattttacttcctagagacaattaacagtatagtttttatgtttgcttctgtaaatatttttgcatatacaaacatacacataaaaatatgcccatttttgcacattgagagtataataggcacaatgttctgttctttgatgctattaccttttacataattaacctggagttttttttttcctgtagcgcaatagactgacagatggtgaatgaaaacttgcactatggagagttatgtcagtgttttaataagacaggaacccagaaataaatgtacgaagtttaacatcagcatctcgtggcctttaagtcaaattggacaaccattcaaagcttcataaatgctaactgcttctcatgacttcagaagcaaacaaaaaaatcattattcaaatgggaaattaagctgatcatcagaagtacagagaggatgtcctttcttaaaggcggcacgtctaagggagtgtctgagacctggcttcttcattcaggatggaggctgctgctactctttaaaagaaatgttcacatccttacttcctgacttccttctataacacagtctgcttcacaacactatgactttatatgtcagagcgggttaggaggagctgaatcttaaaaatttaagaagatgccaaggtctagaaaccactcttaacaggggaaaattagaccctgcttgcttttgggaaaatttgttttccagtcagatgtttgtcaaggttaaagaaattcacgggccctctgttcgaattgggagcaattgggagcccttaagctgaatgagtagacttgaagtcccacttagaatgagcctttatatttttgttctgtggcttgctcagggaagggatacacacttggggagaaaaagacttggattctagttgatgtttttctcctagctgactagggaattcagaacaagttactaagagctttctagtccttagttctctcatttggaaaatgaaaattttaaattagagattctatttctaaggcaccatgtatttcattttcttaataaaaagtatatatattcccctaaagaatactcataagaaaaaggtagagttaaaatttcccaaattatttaattcctggttgcccagtaaccattaaatttctcagcagtcaggcaagaaccacattcccaccttgagacaagatttaggcctttccaaacttaccctcgggctctgttccaagtttatttgtaagtcagttgcatacaatttggaatgaaatgtgttataaatggtggttaggtccctaagtcacagaatcttagttaaccctcagagtgcctgatatactgcaccatgtaaatagaaagcagctgtatgtttctatgggagcaaaaaacttttgtaggaaaaatggtagaaactcgtactgcaggtgttgattattcagcaaacttctctagataaggaggactgggaacttcatcattattggtctagttacattcctggtcactccctcatcccattgactggtcagtttccctccctgtggtccttgtgcaagggtttctgcctcaccccataccctctgctccttgcccggtatcatggttcttctgagggtactactgcccattcacccttgtgctaattaggattacactgggtaaggaaagacatttgttctgtagcggagaagcggggaaggccatcagaggctttgagtgtcagaaagatttggtcttgaatgcaggctctgggatgcaaccgtagggaagttaccaaacatttgtgagcctcattttatctttaacaaagctgataatacagaactcagggccttgtaaggactcgatggtatcaggtacacacgacatttgcccttgagtgctcagcgaatgttagtattccttctgccatcggcctgtcacttccgtttttctctttggctctacagggaatacttgcatacaaaaagagctgaagtaagagtcacctacatcttaggaaaaaagggctgctttaggtttatcctcaagtagttttgtccaggattctgaggagaataaaagctgggtcagatccagtgtgttgaaaagaaagctgaggtgagaagtgagagaaacagagaggcagagaaagggggaatgagccctgtctgctatgaagtaggaggcaatccaaaagacaaggaatccgtggtcattgccactgagaggagaaagaaggcaaactcactcctgtgacttcagggccatccatgaggtgggcagaggaactcagagtctgcccgattcttggattgaatcttcaaattggtaaagctttatatcaagcaactcccaaatgcagcatagttttgaggtgataaagaagagtcttttcaaggctgggcacaatagttcacgcctgtaatctcagcactttgggaggccaaggcaggcagatcacttgaggtcgggagttcgagaccagcctggccagcatggtgaaacctcatctctactaaaaatatgaaaattagctgggcgtggtggtgggcacctgtaataccagctacttgggaggctgaggcacaagcatcacttgaacccaggaggcagaggttgcagtgagccgagatcatgccactgcattccagcctgggcgagagaatgagactccgtctaaaaaaaataaaaataaaataaaaagagtattttcccggagtaccggtaatattggttccagattcaaatgtattgtccagatacacagagggtaaacaggaacgcttcaggcatcctttattaaaagcacctcagtctatgtcagagggccaggcagtccattatctaatgaaaatctcctaccattgatttattttatcataactgcagctgctaagtaattttgtttaaggaatgatttacatattagtgtcttcagcaggatctcatcattagcatctagtctccagaaaagttaacacataacagtgaaaagaaaacattctctatcacatgcttctgcatgcatgggcaatttgagtcataccacctgttcccctcttctgttatgctagagtatacaaaaagcagagatacgcatagtttactatgatcctagatgcttaaatatcttgaattgtgttctatcttggactcattattcatgcataaagactcaacagattctcttcttgcacctctcaaacagcaacatcaacaaaacccaaacaatgtatctttcctaatgaggtgaaagcatgcataccagcctaagacagaaatgttgcaaaaatgttttttgcaagaaggtcagtttgcttttcccatggtaactaaggttaatttctactgtggttcattttggcatccattttattcatgatgattattagagggcatggatattgggggtgtgttgatgttgggcaccagagaaatggaaagaggcagatggaggatgcaaatcattttcactcagaacctaaaatgtttactgttagataaagggtagagaagaatcttaatttgactgtcaaaacatatgattagttgaagttaccaaaactatttttttaaataacatttatcttaagagctataaataaagaggaaattttgcactagagatgaagttatgaacatttcattaactctaaagagttaatgaaaaactagttgattatatgtgttcatttataggttgacacgtgaatttccagagaagtaacttgtatgtttttaaattccaatccttatcttacatctgggcagaatcagacttgtgaacgtcccattccaaacaaatggctaaacactttgcagactttgtctagaagagtgccttacccatataagccctctgttataaaattgttttaaacgttaaattagctgtcaagctgttctgcatcagtggcaccacctggtagcaaggatggagatctctgccacccaagatctctttagtgctcacgtcatttctccaccgcaaggaggattgcgggggtggacgatgctccctatttagtcttctgcattttgttgcttacagttcaattaacatgtcagttagagatgacttttggttgcagttaataaaatatctgaccaattgtatcttaaacacagaggagttgatattttttgtagaacaagaagtctggaggcaggtagttgagagctatggaagagttccgtgatgtcatcagagacctgggccatggtttattctgctgtaccatttttaacgagtgactttggtcctgatggttccaagacgactgctgcttctcaggcaggaagaaagagaaaggacgttcagcctcagagtctctttgtctttccatttgggaagggaaatcctttcttgcagatatcttctcaagcattggccaaaactgtgtccacacagcttcccctggctggatcagggaattgagatcctccagcctttgtagcagagaaagaccaaggagaaagaatttgggaaggggtgttgagtgagccaacatacagttatctgccacaattaaatacagcggattcaccttgcaaataagcattctttttagaccatttattttctttctctctttgtcccaattcctttattccttaggaaagtcttgatatctttgtgaggtgtgtttcaaaaaagaagctccagctcaggttgtaaggagtaagcaaaaataataattccagtgattcagccatagaagtggaaaattatattatttgaagaaaaattagatgtaaaatcaatgtcatcgacagcttaaacctggtaaaagcaaggaagttcctttcagaatctaattttattccaaatacatttattgagcaccatcatttattgccctagatgccaaggataagtgaacacaacatgacctcttcagaagtctgcatttttctcatcttttttccctcaagtataagaatgaaaaataaagctatttctaattagttacatcagtcatttctatcagtattactatagattttatttttattgtatactggatatttaaactaaatttaagcctttgtgggcttagaaattactgtttcatgagtaacatggcttatgtaggaaatttccaatgccattaaccttaaaaatgttcattggaatactgcttatgtcatcttggaaactacctttgcggttgacatataaactgcacgatggtctattttcattatatgtttctgtatgtacataagcatcctcatgataaagattgtctacttgatcaaacttcagccagactcctgaaccttctcctaggcccacctgtgcacttctttgtaaaaatccagctgtagcgagaatcctgctaaatcagtttagcaagaaccaccttcctcttatgtatctgatcaggttcctcatcctccaccatcccccatgtgacgtctgatcaccctggcctgtgtcttcagcaaggttcctgttaagttttttttagctagaatcccccttacccccatgctttctcttagtagttttccatccaccaaaccccaccctgctccttggctatcaattcccacttgtccatgctgtattcagagttgagcccagttctatactgaggtctctttcccactattgcaatattcctgaataaaatctgtttttaccactttaccgtccatctctggtttttctttgacactcacataaccagagttttgtatgtgtgtgttgcttgacacatcacaaatacctgggatacgtgtactgattttttacagggtgaataatctttttgttttccccaatatcttagaaacctgaatctttaacccctgggcttagtacacagttaggcatataataggtgcttaagtaagcgtcaactgatgattttaaatgcagaagtaattgtcacttaatgaaatatagtcaggagactcatggattttggcctgtcttcctacctgttcttgtactgcaacagtaagtgtattaaggcaatatttttggcagcacaatcatttagtttgaatgcattagtaaaaggtggagtccaaagaattaatcgctggaaagttttgggaaaacccagtaacaactgtttccatagagtaatttgagtgacagccaggtaatagctacttattggagggactccacagtcagagccttgacagggacctgaaaaagagtgtaactgaagggtaaatgtaaaagcttttgggagaacaagggagtggtcaggctgaggcaaagatctgaaaagaaatgcctcctggggccaagctggtaatttgaatgactgaaggtgactgggtgggaactggggcaacctgaaaagcttctgttagggtaacagagcctccgttgcagctgactgttctatgagaatgtgagtctctattgtcaggtcttcaggttcttccagagaagcaagacaacgggaaatcaccagatttttaactaatggcgtatcattcaacaatttcaaaaaccattatgtgagcccaaactgaccaacgaatcaaacacacacacacacaaaaaaagagtctgcagactaaattcaaccagttggtgacctctggtctgtggttaccagagaagtaattgaaatggagttttgggagaaagatcatatgttgaaatcttgggagataagggcagagaaataagtaagccgagacggcggtaaggccaaggtagaaaaggtagcctttaggaaaattaagttaagactttttaaaacaggaaggggcaaaagatgaggttaaagcagatgaggaaatttactgttatttattttcatcattaaaatacgctttccacaaatttttcaactgtaagagagagtgataaattcaaaataggtaatgtcaaccatattatgaagagtatgtttttgcaatccaaaaaagctaaggcacaacattaaaaaaaaaaatctgtgaatttggctttgcaaaggtataagaattaagtcacatctgatcatttttagagtcttaccttttataacaaagaggaaaatttaattaaactggctctgccctggcgaatctgggatgtgtgttcacttatgaagagagactgttaagattcgttaattaatgaggttgagaatagagttgaaggagattggggtaaatttataagtttgtgtcattctgagagttctgtaagtagctgagttacccatgttgtgactgagaaaaacaggagagagcagtgactgaaggttctgagccaaaggaggagaatagtattgtttattccagcagccagagtggcctgtgtgactgtaagtcgcctgtcaagagggagactgcaaggaaagtgcattgatttgatttggagtagttgtaactgcagcatgaagaatatgatatatagggatgataattgaggaacaatttaatggctgcataccttgctgaagttgaagttccttctggagataaaggtggcaaaaaagaaagtgcttaggtagaagagctttttaaaatgagttaacagaaaacagcagactaaatatggaattgaggagtaggaaatgaaggaaatgaatttgaagatttactttctttcaggatgcagagctggtatgtaatccctctgtttccagtgccttctcccacttccaaatttcactgctcctcatgcgccctggtgtgtggtgcagcttcgagattaagcctccagccttctgtcaggatgaagcagcaggtggctgagatgctaggctccaagtgggggaggtgtttagggctctaaagactttcaaccagtccttgtattttcagccacatttcagtcttcagaggaacctggagcctttcatttctgagacttcttggctacataaactggcatgcgtcttgttagttcctcccactccctgccccaatctccttgtctccccaacatcattaattgagcttgggatttctctggtctcctaagttggttaccagcaggtcattttctaagccaccaaaatactggagctctgatctgttctcatctcctctcctgttttgttaattttcttttgggtaaatgccattttttattcctcttctatcaacctggtagagtttcagggataaagagagacaaatgagtctgctccatctgctgtgtttaactagaagtcccaacacccaaaatccttcacacgatgtgcagggctctgcagtgggcctccccctgcctacctgtcaggccttatctgtgcccactcttcctccttcctctctgagatttcagcaatattggccttctaaggattcttaaagccccaccttcttctctgcttcagagcttttttttttttttttttttttttttaacatgtgctgacctattacgctgctgtgttcttacctggcacgctcccatcatccttcaagtctttgcttcaatgtcaccttctccaagaagcctctcggacctatgtttccctatgtatacagtctcatcacttcctgtgtgtttccttcaccattttaccacagtacatatgaatatttgtttgttagtttgtttgagacggagttttgctcttgttgcccaggctggagtgcaacggcacaatctcggctcactgcagcctccacctcccaggttcaagcgattctcctgcctcagcctcccaggtagtagctgggattacaggtgcctgccgccgcatccagctaattttttgtatttttagtagagacggggtttcgccatgttggcccaggtggtctcgaacttctgacctcaggtgatctgcctgccttggcctcccaaaggctgggattacaggcgcgagccaccgcacctggcctacatatgaatatttgattattatccatctccttcgctacactgcaaagtcaataaaggcagagatttattttggttaccagtgtattccatgtacttggcatggttcttggcttatagtacatgcacaataaatattgaaaggatagatgaaaggattatggatagatgaatgtcttttaagcagttataaaacagttctgcctaaagagtcttttttaatcagtagtattacttcaaatacatatttaaatacacatatgttataaatatataaaatatgtatttaaatatgtcatttgtactattttaaatgtatttaaaataatatatgttatatattaaaataatactaatgatttttaaaagatcaggcaacactgctttgtagctttttagaagacatttatccttatggatccataattattatggattgtatgttttatatataatgaaggttttgggagttagagccctgatccttccgctcttgaagcttgatttaaaggagcatggcacagtggtgcctatatgagtcagccctccattatctggggcagaattcaggccccagaaatggtacttaagatacacagttctcccccagaaaactttatatcggccatttgttacagaaactgctttctcaacaaaccttttaccagggcagctaacaatgagcaaaactaatttgaatttcaactctgccattattacagtgttgctaagaagtagtgagattctgctgaggaaggccaagcaagaggagggagccagaaatgccttaaacaatccacagccaggattttgtgctatcttttatttcacagttgaacttctcagtattttttggttcataacctttttctcttttcctcaattctgagtcttccacatttgtgccatactaggtactttattgcttctctcccttttttttttttcttgagatggagtctcattctgtcgcccaggctgaagtgcagtggtgcgatctcagctcactacaacctccacctcctgggttcaagcaattatcctgcttcagcctcctgagtagctaggattacaggtgtgcaccaccatgcctggctaatttttttgtgtttttaatagagacggggtttcaccatgttggccaggctgctctcgaactcctgacctcgtgatccgcccgcctcgacctccataagtgctgggattacaggtgtgagccaccacacctggccctctccttcatttcttagaagagttttacaaagtcattggtgataaataagtaataccatttcacatctggaaacataacttgatagtaattataaattcacagactgtactttctgtacttatctaagtatgaatgcataattcctgtttatctgtgtgtaggtttatttttcccccatttaagtaaagctctatgttgatgatgaggtttttacgagttgagattttaagaggcctcaaatatatctaaaaaattatagaccaagtatgatgtgttagtgttcctcttctctcagctaattctttaaagatatgttccagaattcctggtctgttcttgaagatctcccaataattctagacttctgaagcctggatattttggcttaatttgctttcaagacagactggatttaaattactcaatttgtctgaagtctcattaagatccaaggttcttgtctgttctagtgagtttgagctggcaagaataatacttgtcatctgaaaagtccattagaatcctttggaggagtgagactggaaaattggagacatattattatattttaaaatatgccacctttctataataggagtatgtggggagactgccttgttttggcttcttgggaaaatttggaaaattagtaaaataggcaggcagtagtagttcaatgcgtattgtatgccaaacactgaatttagaacaatactcccccaaaagcatatgtgctctaaattttatttttcacttaccacctgggagatttggattaaatttcttctgggaaatagagttggtatgaagaaacaaagaccactataccaatttatctgttggaataatcatttagccgtacagctctttccactcataaagttaatgaggtcattattgttctttctagctaatagataggcatattgaaaccttaggcctttccaaaaagtctccataagccattggaaagatagactaaaacactccttgttttaaattctagacctcagttcagtcagagatagtaggatttttgcagtattattaaaaagacagaaaccagctataaaattgaaatgaagggacttaatgttttttttctgtaatatctttggaatgcttccatggctttaaaatgctgaggtgtttctcactatttttcaaaagcatgtaacatgtagatatgtgacgcaaacttgaccagttgttcctcttttctggtgaattttgacacctgctactattacacagagtaaaagtgaaagtcataaaacagaaatacttaccaaagtcaagaaaaatgcatagactaaacaaaggggcaagagaagcctattacttgtttcatgtttcaaaataaaagatgaatggcctatcacttcagtagttggaaattcaacttgagaaggtaggtggtttgatgtttgcccttgttccttacgtttctagatttctctatttataggctagaaccagccctggataaaataatacaagttatgaagagaaatgtgcagttcagcatttttacccttctgaagtgcgctttctcccagctgccatggaaacatggcgtaactggtttcttggatagtctcactcctcttgagttccggctgtgagagctagtgagctcattacaacttggatcagagtcctggaaagtcagctcccagggaaagtggaggacagtctctcatggggcacgggaatggggggctttagctttattaaactgcatacatactttcactacacagtcatcccaagctttagcccaggacagtgtcacattgttcacagctgtattgcatcttgaggtttctgtgtgcatcctacacactttcctaaggcagagacttatctcttccagctgtaagccggagggagtggtgctgcagactcctagcaacacatgcggactcaaacaacacaggcagttaactctcttgagtagtagacttgtagggcaccagaactccgttgcagttcactgacagttaccagatatacatttgtatggcttccgtagcattgtgatggaagctaaacgtttgccctgctactttcttttttttttttttttatttttttattttttttttattatactttaagttttagggtacatgtgcacattgtgcaggttagttacatatgtatacatgtgccatgctggtgcgctgcacccactaactcgtcatctagcattaggtatatcacccagtgctatcccccccactccccccaccccaccacagtccccagagtgtgatattccccttcctgtgtccatgtgatctcattgttcaattcccacctatgagtgagaatatgcggtgtttggttttttgttcttgcgatagtttactgagaatgatgatttccaatttcatccatgtccctacaaaggacatgaactcatccttttttatggctgcatagtattccatggtgtatatgtgccacattttcttaatccagtctatcattgttggacatttgggttggttccaagtctttgctattgtgaataatgccacaatgtgaaggacctcttcaaggagaactacaaaccactgctcaaggaaataaaagaggatacaaacaaatggaagaacattccatgctcatgggtaggaagaatcaatatcgtgaaaatggtcatactgcccaaggtaatttacagattcaatgccatccccatcaagctaccaatgactttcttcacagaattggaaaaaactactttaaagttcatatggaaccaaaaaagagcccgcattgccaagtcagtcctaagccaaaagaacaaagctggaggcattccctgctactttcttctggtatgcctgaatcactgtttgagaatggattggactttggtgcgtggaaaactggtagcagaaggcttattcactgcagtgggttgggggtaggctgaaaagatgtcagggaggattaactagaggcagaatgtgtcatagttagaagtatttagaagggaagaaagtttgaactctgatactgttccacactaatattcatgccctgaaagaatcagatcattcttgcctctcccacttggatctctagctactggaatttgccaattcttgatatgaacgctaagatttggatggagcttgtgacctcatttagaccatttgttctaaatgctgaatagaaccaggaaaataggaaaagagggtagaattggggtcataagagaggaatcgtcgttctttgaaagaagaaagatgataggaaactaggcacatgagttacgaggcagtggagaaggaggattagaaagggaaaaaaagaagagaaactttatgccaatatcttctacaagatgtttggctggcacaaaactaacactcaatacttttgcataagtaaaggaatgagagaaaatttgggattggatgcttatcccctggaaactgctacaggctggtgttaatgggaaagggatctgtatttgaccaaaagtgcatttccacgtctctacatttctttttataaagagtcaaagggactcaatgatgagtgtgtgtgtaagggaactccacactagcaagtacaggaaaaatttgatggtactggtgaaggatgttgcaccaatctggaggggaggacaggaattggtttctcatggattgatgccgcaagacaattcataccatgagttggctgagaccacttaaaaaagtaagcagtgatgactgggcaaaagagacaaaggaagaaccacatcttttaggggagagagagagaaggacaattaaagggactcaactagatcaagttctgctcactaaaggacagcgtccaggcaaatgttaattatcttcaagaagcaatctgtatatatagcatttcaagatactccgagatgcttttaatttattgaatactttttattggtatttatcataaacaagagactcacaaatatatcccagaggggaggttttggtgtagttgactatagtagttattaaataatctattaataaaagcccacaaaatggaagatagaaagatagaaaaacaaaagacaacacaggatggtgttggtatacagaatttatacttgaagtttaacaacacggaacaagaaactttattaaaatattcatttaaagaacttccatatgaatcaccagaggctcttagtaaaatattgattcggattcacagatctgggtggggcctgagattctgcatttctcataagctccaagcagatactgatgctattcttcctcaaatcacactttgactaacaaggactcacacaggttctctgtaattggtgttggtagtcattcatggttagatgtagttgaggactgccctcttaactacctctcggctgccaggttataaagaaagcaagtctcagtacaagttctgtcacttaggagcatttattagccaatgggtacaaaacaatcttacagcctgtgccagagacacagtgaagtcacagttctgtcttttggggtgcttggtgtgagaggctcacagtctacacaggccacagtcctctattagagtggttctcaaagtgtggtccctggaccagcagcatcagcatcacctggaaacttgctagaaattcagattcccaggcccttcccatacctactgaattagaaaatctggaggtggggcctaggaaatctgcatctttaaactatccactccaggtgattctgatgtttgctcaagtctgaaaaccattgttctagcagcaggattccctcaaccatctaactgaattctggcaactaagaatccggtgaaccacagctggacattttggaattcagcctagggcaccatttctaaagatggagaacctactggattcttcttaaactcaatttaaaggcagggagtgtttctaaatgtttttcaacaatcttcatattttgcaaaccactaatatcactacacaggcccgtctaactattaattaggaaaattaatgaaacccctggtgtaataagagctaaatataactgaatcacttacagtggccgcctgtggcatgaggctttttgattaattgctagccaaccacccttggagttcactcctgattaagacaactgaccacctctacagtgtagcttaagctaacacacacatacatcagagtgtactgttcatgtgagggtttttaaagactcttaaaatttaccttatcagggcataatttaaacactataacatgtttccattttaagtgttcaggttagattttggcaaatgtatacactcgtgtaaccaccatgccaatcaagatataacatttcgatcacctagaaaacacccttgtgttcctttgaggtcagttacctactcccaccacaccccaggctaccatctggcatagtagctaagttttgcctgttctagaagttgatataagtgaaatcaaacagtatgtactgttttgtgcctggcttcttttacccagcttagtgtttttcagatcagttcacattgttgcattatcagtagttagttcctttttattgcactttgcacagtagtatcccactgaatgactttaccacaacttgtttatccattaccttactggttggtttccggtttttgactattatgaataaagctgctatggatattcatgtacacatctttttgtggacatacatttttttttattctgtgcaaatatccaggaaaagaatatttgagtcataatatacatgtgtgtttaatttcataagaaactgcctaactggtttcccaaagttgtcgtacattcccaacaagcagtgtctgagaattccagtcgctccatatcctcaccaacatttggtattccggtcttttaaacaaaattgtatgctgaatagtttaaattacagacattgttttctttcccctagttgaaattcaggcttttatgtttggtctctgcgatggccataaagctgaaaatgttgacccaagtgacttggatatggattgaattattgccctttcctaacacctcatcagaattggtttcgtaggtgtcatttgattatggcagtcatgtatgtcagtgtactttttctttctttcattcttttgtttattgattcagttggtcagtcggtccatgatctgtattaaaacagctttttcagagggcagttgcatattaagttgctaggaaaaatgacagaagtaggtgacagagttcttgtcttcaaggagctttttggagctgagttcctgaaataaatgtagcccagtatctatcaaggcttgtgcagacttgagtaagaacatcatctaaatatagcttcctgctaggtggcgtgagtcagggcttgatagaccggtgactgcagaaaccacagtaacatatattgttgttattctgtgctgaacattagaatgattgtaccttagaatatagagccaaatgtttattttattcctaattatatttttaaatacatatcacacacatagacacatatgttggataaaaaatactcaaaatgttaacagtgcttatttaaaaggtttatataaactttttttgtagagatgggatctcactatgttgcccaagctggtcttaagctcctggcctcaagcagtcctcccaccttggcctctcaaagcgttgggattacaggcatgagccactgaatccagccagttgtgcctatttttgagtttatgggcttgtggatgatttatttgattatatatgtatatgttaaatgtctaagttacccaaagtgagcatgtataacttctacagtcagaaaaaatgttatattgccacttgattgtttaaggtcttatagctatttaaataatgtatttcttgttctctttaatcttgtgcagaaaagattcactacagtagatccagattactttctagaaaaaaataatgcctgtccatctctttcctcttgggaacaggactacatgaatgcccttcaggctataccactttagtcttcacagaacttagccttcctggttgtcaaagggcaaaaggaattattttttcttttccccacgttaacagaattttcacctccgaaagcttggcgtatacacactatatgttttctaggctatttttgtggtggttgtagttattggcaaatcactgggcgtcgggggtgggttgtctgttatttctgatggaataacaaatgctctttgttttccctcttttcagctgacctgaataatgtcagattctcagcttataggactgccatgaaactccgaagactgcagaaggccctttgctgtaagtattggccagtatttgaagatcttgatactatgtctttgcttagaataaaaagtaggttgggtacatttttacttagagaggggagaaacagctgtcacaattcctgttgcaatgtataattcattctttaatgtatccttggcctagagtttgcctagaatgttttgttttatttttagaatcattcctgtcaccattcctcagctactgatgttgaattaagatattgagaatttttattttccaactactggcattggcatcggcatccataattacctttgtgaaacttgcacaatccttgttctacctttgtttttttttctttttacaaaatgtacttagtattagaagactatgactatctgatctaaaccaaacttcatagacatgtgtggtttattagcttgaatgctaacgtgcagatgaatgaagtggtagaggaaaaatgacagaattgctttcctccttttttatcatacatctgtggaaaaatcctgaagtgttacacagctctatcatgtcatcaaatagtttatgtataactctactattgtctgagggtctgtgtgcattgatgatatgcccatgaaacaggcacagtttctttttctttttttctgtttttttttttttttttttttttttgagatggagtcttgctctgttgcccaggctggagtgcagtggagtggcgcaatatgggctcactgcaacctccacctcccaggttcaagtgattctcctgcgtcagcctcccaggtagctgggattacaggcatgccccaccatgcccggctaatttttgttttttgtttgtttgtttgtttgttttgtttttttttgagacagagtctcgctctgtcaccctggctggagtgcagtggcgcgttctaggctcactgcagactccacctcccgggttcacgccattctcctggctcagcctccggagtagctgggactacaggcacccaccaccacgcctggctaattttgtttttgtaattttagtagaggcggggtttcaccgtgttagccaggatggtctcgatctcctgaccttgtgatccgccctcctcggcctcccaaagtgctgggattacaggcatgagccaccacgcccggcctaatttttgtattttttaatagagacggggtttcaccatgttggtcaggctggtctcgaactcctgacctcaggtgattcacccgcctcagcctcccaaagtgctgggattacaggcgtgagccaatgcgcccggcccaacaggcacagtttctgctctgatggaacttacagtctaacaagggataaccaggatgttcatgaaatttgtagacataagcaaatatatgtataatgtattaagaatgtctacagttggttaaaaaaataaagtgatcttgtctctatttccaagaccatttcaatgtcatatatttagttgtgcaacagtgggacaatggggtactatgtgaacagctaactgtgtggaatgagattcaaagaatgtttgtttgaagaggtgatgtctaagctaggtaactctagaagagtaagcagctctctctctaggaagagcgttctagtcagaaagaagagcatgtgctgaagggcccagagaaagcatgacacattcaggaactgaaaatatgtcagtatggctaaagcacagaattccaggggaaagatctattgtgaaataataggctggagagagaagcaggaagcagattgtgcaaggtttttaaaacccaagttaaggaatttagaggtcaggggatttggcctgggggtgacataatcagattgtcgcttagaaagatgattcttgctgtggaacagagtatggattggtgcgatgtgggagtgacaggagaaaaacctgttgcagtaatctaaaccagcaatgtggtggcttgaattagcagagtagtaagggagataagtggagagaatttagaaatatttaggaagtggatttgacaggcctcagtgattcatttgatgtggtgcagggatgtccaatcttttggcttctccgggccacagtggaagaagaattgtcttggaccccacataaaatacactaacgctaacggtagctgatgagctaaaaaaaaaaaaaaaaaaaaaaaaatcgcaaaaaaaaaaaaaaatgttttaggaaagtttacgaattcatttgggcctcattcaaagccatcctgggccacaggttggacaagcttgatgtggtgggtgaaagggagtcaaggaagacacttaggtgcttggcttggaatatcaggtgaatgtgggacttgtctggtaaggttagacacggagctgtggtgctcaggagaaatatacaaacaacgtttagggatcatgagcctgtaggtgctgcttgtaacgggggagaggattggatagctccaggaaagtgtagcgtgagaagggaagttatttaggacacaggataagcaacctacagaagggactgcaaaggaatggccaggaggaaagaaggaaaattccaagaggttatgatgccacatgctccatgggaagaaagaaagaacccgttaccagggtcagatgttgctgggatgtcagcataaagttgcggaaaatgcccattggacttagcaacaggaaggtccctagtaactttggtgagattttagaggcacagtggaagtggtgtggtgagttcaaaagtgaaccaaaagtggagaattagagaaggtatgaatgattcttggagaaatttacttatgaaggggagaagagtggggtggtagctagttggagggggctgaggagttaatggaaatgtatgtacagtcacgtgttgcttaacaatggggatatgttctaagaaatgtgttgttaggcaactttgttgttatgtcaatataggagagtactacacaaacttagatggtatagcctagtacacacctaggctgtatgggatagcctattgctcctaggctatacacctgtacagcacgtgactgttctgaatactgtaggcagttggaacacaatagtaagtattgtgtatcgaaacgtatttaaacatagaaagatacagtaaaaatatataatagtgtaatctcatgggctcgctgtcatataggcagtccattgttgactgaaatgtcattatgtggcacaatatgtgtatataagtgtgtgtgtgtgtgtgtgtgtgtatacattgatccttgaacaacatgggtttgaactgcttgggtcaacttacgtggatttttttcaatcaaatgcaggccaaacatatagtattcgtgggaatgtatttatatgagtatgagaagacagggtgagattacaattattggcccaagaggagatgataaataatgggtgttctcagagaatacgggcaggtaatccagagcccaagggagggaagagatacctctcttccactgtaatgggtggggtagagggaaggatctgggcaggtccaggtaactaagaaaccaggtagcagcaaggtgaaggatgtcttactataaaggcttccattttttgtatggagtggagagtccctgcaacgcagttaacagcaggagatgatgaagttgggcttatctttgtggagaataagagagagggcggagttgaaaaccagctgtgtgaacccagaggcggctgagtgtttcacggtagctccaatctgcaggggtgtggtatttccccaggcacgcttagcacttgggagccagatgcttctgtcctggggtagggagggaacagctgggcaagagaagtgaggatttgggcaaaagattgattaaaatgatactgacaagtccctgttgggtaggagaagctgtgaacgcatatggaaactggtaattaggaggtagagggatgaaaatgctaactcttcagggaggtaggggaagaagtagtaaaggaactgaaggtcaagaagttgtggtcagagagaatcatagatgaacattattttgaaggtggaacagtttcaggtgattagatctaggatatagccatttgagtaggtggcagaggtagagtggatgtgaatttccatggaggtgaaatagcaagttaaggaactgagaggctagaatgatgcatgagtcccccatgccaatgttgaaatcatgcagaattggagcgagaactgggcaaaagagaaggaccgtgaaccctggctgccaggtcttcagaaataaaggggttcaaccagaggatctgcagaggctagcaataagatagtcaaggagtcacttggcatatggttcttacacagagatagagaagaaatgccttagaagtggaattatttggaaagagagactaggccttttcccttcatcttggtatccccaatgcttagtacaaaacctggcacacagcatggttcaatatgttttcatgagatgaatgcatgaatgaaagtaaaccaaggcttccatttccttatagcccgaagttatcatttttcagctatatagttgccaagtttaactggtgtttaaagggctttccaggtcgagggtttccttaggacctgttaatacgtcatagctgggaaaaagtagtttgggatgggatcgagtcagggggctgaatagagaaagttttcttgcctctttttcttcacctgcccctgcccctgcccctgccccatcccagagctactgctttcctttaataaaggagtaattaggcactggttatcatgaagtgctagagaatattcctgtgagatcctaaaagttcagaagctaaccatttgttccagtttatactatggaaaaaaaaaaaaaagaaacccagaaatagaccagatggaaaaaccttataatgactgttcctttctataatgtccattttcaccctggatttaggcattattcgattttcctgctcaaaaaaaattccattcacatatgtgttttattgtctgtcatttcaacttataatttccaataaactttgggaaaatgggggaatttcataatatacaaaattttgtccatttgaggtgataaccttgtaataaaggtaagctccgaatgtagaataatttctttaaattttcacttttaaatcaatttgaaattctctgcatttcctttctgagcatggcttttctaatatgtgaaaaagattcaagtatgccaaaattaaggtgtatgtatctaaattaagtattgaattctcattaatgctaggagggtgccatatatagtaaaactatagaatgaagagttcaccccatccttttattgaacatatgtgtggtcacattacttactttcaatatatgatttaagaattttctcctaattttatatttgcttagatttagcttccaggcttttgtcatttctaagcctgcaaagccatgataaagagctattgtctgcggtacaggcaaataaaacttgccctggctagctttccctaccaaaggccacttctaccaactctaactttaaggaaaattaatgatgttatctcagtgatttcctggtgccagtgaagagtttgaattacagatgccttggaaatatgcacttccacctctattaagcacttgatcttatttttttttcacttccctatcaatgtttccgtattgcagaaagccaaataacccaattgtatccactatagagaattcactatttaagtggagagcatcaccgttggcctataatgtccccagtttgtaatcagttaagtgttgcatgactccttactgcctctcaacacattggaaatgaaaatgaaacttggtagaaaagcaggaacaaagataaaatcttggtaagaaggatttataaactgtttcatatagctgatactccattgaaagttatgaagaaggtaatttaagcattttctttctccctttgtagttctgatgacattctacaggtgtgaggcttctaaaattaaaaagccaacttgtaagagcagaaataaaaacgcacttaacaaagcaagtgtatttagtttattaataatgtgtggtgggttggagagagcccaaaccatagggctaaatatactgcagttgataagtgtgacaaatattctgcaaacagtaagaaatagagaacattttgcctctattcagcaactaaagcacacattatagagatttggtacaggctggagttgtgtgaatagtcacagtttctggactcgccctcaccatgacaaaccaggtgaaaaatgcaccgccttctctgtaaatgcacctcaccttttgatggtgcgctaagggtgacattagataggcttcagttgctaaagaagactctcaggacccacaataacatggcttacaaatccgcgctctattgccagaaaaggctacattacaagagcattactgtcaggatatggatccacagccacaggctgcctccacagcaagggggtctcgagaggccagtgtaattattttgccactgtcctacaaaaatctactttttctatataccatgtattatttttcacataggttagaggccatgtctctgttagttctgagtttaagacgtcttgaggacatggccaaactaattttctcagtttatatggtttgacagatattagtgcccaagagaggtctcataacatgacccatctatctcccaggggaaatactgtaatcttgtttagctgttacccactagggaaagaatggttttctctcagtcagatgctaaagagattaaagaacacctcgtaggttccgttttctagtaattattggttccattctccagctatcaaccttggcagcttgccatccctatccttcctcctggaattggatgcccttgaagtgcgcttcttgcactaggaagtctttctcgtcagtttatcatttctcattcaaagcaaattctacctggccaggtatctctagcccagttcctaattctcctaatagaagtttcttttatttcaagtggattcatgccccttggcccaccagacatgttgccattgagaaatagcagctttaatgggaaatacacatgagacacaaaaatgtgactaggctaaaatcatatgaatagtagtcactcctaaaaggactttggtttgggtatgtcacagaaatttctgtagccatccatatccaatttctagcttttcagtctcaggaaagtaggcccaccaaattcaacttaaatatctgtcactgattcaagctgtcccaattgtccctccacccactaatggctttccacacggagtaatggggcaaatagctatttttttaaacacataatgttatgacagatgaaacatacagcacgtaagccttctatcacatgcccaatacctttgttaaaccttcatcatcacaattgatggccacacagtgtttattgagattgttataaatcattgttcttcagatttgactgggtaaatattccctcaggttatttcctgacacagctgattaataacagatatgtcctgtgaaagaagaaccaaaagacattaacgaatactaaccaaaagccacattaatattgctccatggtgttgtagtcgcagttagaacgcccatctcgtcatccagtgtgttggataggttggctgactctcccactcacatcttggctctttcaaggaggaggaggttttagcagagtcccccaccccaagaggcatctgagtctaagccaagggagcatattattctcttattttaaacctctccgtaggcagcaacattatattaggttttccctttaaaaaaaaaaaaaagtatcggctgggctcggtggctcacgcctgtaatcccagcacttcgggaggccgaggcaggcagatcacgaggtcaggagttcgaggccatcctggctaacacggtgaaaccccatctctactaaaaatacaaaaaattagccaggcgtgatggcgagcgactgtagtcccagctactcgggagtctgaggcaggagaatggcgtgaacctgggaggcggagcttgcagcgagccgagatcgcgccactgtcctccagcctgggtgacagagcaagactcggtctcaaaaaaaaaaaaaaaaaaaaaagaaaaaagaaataaaaaagtatctttggtggtttccttccccttgcaacaatctcacctttttccttttatcattaattttaagccaaacctcttccccagctacacacacacaccacacaatgcagacagtccccaacttgtgaagtttcaacttaacaattttttgatttcacagtgatgcaaagtgatatgcattcaatagaaactctacttctagatttgaattttgatcttttccaaggctagtaatatgcggtatgatactctctccccttgctgggcagcagcactgaacctcagctcccagtcagccacaagatcatgaggctaaacaactgacactttactgtgtaaggtgttgctagacagttttgcccaactgtaggccgatgtaagtgttgggagcacattgaaggtaggctaggctaagctgtgagtttcagttagttaggtgtattaaatgcatttgtgacttaagatattttcaacctatgatggggttgtgtgatagcttcaattaggcaaggcacaaggaaggagtaatccattccattgatccttgtggaatgcttgtgcttaagtaccaactaatagccatagtatcttattttggaatattaccagcctttgaaactcttaattgtagccccagttcagggactactaggtctggcatcaaaaaagaaacctgtagtgacatagggaatacctgtaagtgccccacttgaattatctttttaattgtaactggtctcacaggtgtagcccatttctcaaaaatgatagttgcttcagctttttggttgggactccacctgcaggccagagagggtgaagcccagtggaaagaaattctgaacttaacattagcttttggatttttttttagcagccttgccatcagtttgcaattgcctcctaatccattttgttagctccttaggttcaagttctctcacttccagattccactagaaagttacaccatcagtaaccaatttcaaagcctgtgttacttttcaaccaagcgtagcttgttgagcaacttcaaaggttctttttcatcccttttatcagaatcttctttttttctttctaaataatgcctcagtcatacttttagctaagaatgagttggaggtgttctaaacaatcttgcttctgacactcactgccctgacagtggaagttaaacagggttcaattgctaaagaggactcacaggaaccaaatgacagtgcttacgaatctagagttccttgcagaaaaaggatgcaatatacccacaacattaaaacaagaataagtgtcacagccacagcctgcctcacagcatagggtccagagaggacaggtgcaagctataattgccctctgtctgcaagagccacaccacgatgcattttctctcttggaacaagagctactgatgtgagcacagaacaccttggaaaccagggagcacaaattggagtttcagccagggtttcttatatcccgtgggtaacctaggcatactgttcctatgtaaccagcctcaaactcagtggcttccgttggtctgactgtgcccgggtaaaaatggtcaatgttactgttagcaataaacaatggtgataacctgcaacccatggctacacttcaacacagtaagtcactttgaaaagcaagtgctttgaccagggctctgcactgtgtagatattttagcaagtcatctcgtgccaactccagcctctctggaattaacccttactgcacagacaactacatcaaagtgcattgactttcttgaagtgcaaagatttgcttgggaggtccctcagccataagtgtaagttgcctgtagagtggcatgcctgggcaagaaaaatcagcaaacatacagcagttcttccaccattactcacctctttctgtttctgtgctaattagatcacagaattatttatacatcaacatagaatatacagattgacctataggatgaacttggggttatatgggcaccatgagactttttttttctccactaaccaactttttggtgcttctgttttatcctactgttgtcattagcatggaatgcagaatggttttcctgttctgtaaagtcagtaaggacaccttctgccacccacttttcccccttacaatatgtacctccatgagaaatcagaaaacctagatatcctgccataacacccagagtgagtctccatatctctggtctcagttgtctcaactgcaaaatgattttaaagcaaccttctggctctaagagtctatcactctgtaaaagacaaaaaaaatctgtcttacataggaaggaatagcaagagttagctactgtggcatacatagaaaggaaaagaatgagcttttgaagctagaaggttgagaagatgattaggcacaaccagagcctcaggaaccattagtgggatccctgtgttgaagtcctgcctgctcgccgccccccaaccgccactgtctgcttttcctgcacagcaaagaggatcctggagagtcagccatttcttttatcctgtccccaccctctctcacccccacagccctcatgcatagggtaccaccacatggtccctgttcttcaatggcttcaaagcctatagcatcctctactgtaaacataatttagaaagtgaagatgtattagaatacttgggtttttatgtagctttaaagatatatctactagtgaatacacacaaacacacacacacacacacacacatacacacacacatatatatatatatatatataatatatttaatggaaattcctagcttaaggaaacaatggtttcacacaactgtatctgctggttgcttattgagggtcctagaaagagctaatcattacatttaatgtttcatcaaaaagtctaggtgtgttctctaagatgctcattttgaaaagcatatgcatggcaattaaattgtccctattgatattctcacctccttttcgggtccatagcatggattgtgtatacctaaatggaaattttttcaaaatagctccatgaaagttgaattctgtttgacatgtttgtttagggaaatgtgctcttcagtcttctgtgatggattgttcttgtgtttaaccacatccagttttagcagagcacactgcacagtatttctctcctaactgtgtcatcttctgctcctgtaatttcagagcaattgctttgctcccctctggagctatttctactcaacatttgctgttctatgtgttacccattcacctgtacagagataagagcaggccccataaaatgaaatgcatgcagtttttctctgttcatttccatcacacggctaaataagactcttaatacaaaagtgattcgaaaaattttcactagttacttcttaaatgcctggatcagaggcaaaatatttatgatgactaaagcagagtaacaaaaaagaaaataattgaaaaacttcaaaccacccatagcttccttcagtatataaggaaacatgttgggaatattggtgtttggaagaaatccattcctctcttccagtaatggagctggcataccgtgtttctaagtgttcctactacgtgcacttgagtatgtgccctctgaggaaaacaagcacacagaagagagagagaagaaaagtttgagtcttttgtctctggacctcgctccagcctcccacgcagtcttctttcagccattccctcctcacgtcctcccgtcctcctgcctccttgcattgctttttaaaattctttattatttttctcacttgattcttcagataagtctcccaagttatcttccttcctcccactttaaagaaagtctcagcttccatgaaaagggtcatttctctatctttagagtatttcagagcaaaaacagaggggccttcccttccaagggaggagtgcagactcctgcttccaccaccatgtctgtttcatgcttctggggaaactccaggattttctgttttcctttttttaaaagagaaaaatgtgtgcgcaatataggtggaaaagtatttttgcacaaacctacataggtattaaccactatttttgtttttttcttaatatttaattagaactggccatgaataacttgtaaaatatactaaagccttaagtttgcatttctttattactgggaaaggtgtttactgagcgggatttacctctatttatgtgaactacatttataattgaattgccccttccccctagatgcatgagagatttacttaattagcattgattccttgcctcaaaggactgagaattccaaccagagcttaggtgtataaggtagtataaaagcaatgttgttgtgtttctagtttggctaataaattggctttagagaaatgcatcttttcatgacacttgggaataaagcttgtgatttgctgatgttggacaaggttgaagtttcacttttgttaaatttttgtccccagcataagattaaacacctcctcagatcaagggaattttcctccctcagccttataaagttgttagaggacttagaaagaatattatgaaatacaatttgaaggtgaaaggagaaataagcgagcctcaggtctgaaaactggatagattatgcaattactttagtttgcctatagaaaattttagtggagagtatttttttcacctaatattagggtagcagagagatgctgaggtgactgatatttcaaggagaaaagcgcttaatgattataaatgcatagctagaaatagagtttacacaaccttagccatacagattaatctaacagatcttctctaatgctaatacaagaaagtatcatcggatctctttaaaaatttctgctaaaacattttttttttcttattcaggtgacaattgactctgtttatgtagaacaggctaggtccccttaactctcagatattccccagtaatccaaggatgggaattatatctttgcccatatcttcacccaatgccagtgagatttaagaacaacttcagatcctgaatactgatcaaactcatcaacttagagtcgaggcataaaaataaaacacctttcaaagagagtgtggttcacgtttggtgtttattaaagggtatgagagagtcctagctaggattctcagaggaaaaaggacactgaaaggaaggttttactctttgagtcatttgtgattttatttgttttttgcagtggatctcttgagcctgtcagctgcatgtgatgccttggaccagcacaacctcaagcaaaatgaccagcccatggatatcctgcagattattaattgtttgaccactatttatgaccgcctggagcaagagcacaacaatttggtcaacgtccctctctgcgtggatatgtgtctgaactggctgctgaatgtttatgatacgtacgtatggcatgtttttatttcccgggctctgtcacaggaggcttagcgtacagaatggtgaagtgtaattagcattacaacagggccctggaagctgtggacctaatgctcttcctgtgataaatcatttttgcatttatgacttgaaaaatattttgataagctaggagttaagagccagaatgtagattgctctcagattagaaaacaaacaaaaccctgagacactcattttgcaaatagtggaatgagtcgacatatagcctttggttctttccctttctcgcccatggattttggaattcttccatgcacttcaggggtggcttcctctcactggcggccatggctgtgctcctggagatactggcacacctgtctccagatcagaatggtcttagctgatacttaggacacttttgcagaagattatgaattgataggccaaacaaaatgaaaacaagcccttaatacagcaaacttagcttctcaaactgagaacatttttcgttttcttttgttttttaataagattttatgaagtttcagtttggcgcctccattcatcactctctcttagagaacaattgtttgttttggattgcacacaagggagatatccccagttctgatttttttttttcttgagcttaatgaagacaattgaagaagggagcagaaggaattggtcttaattttgcctaaattcttcttagatctcaaaattattacatgcctcatttcaccaatcaagaacatactcccatttggaaatctgggaaggttttctgaaaagagttgcaaaacaactgttttgccttttacctttgttgtagacttctactaccttttgaactaaaatttatacctttttttctttcttattttgataaggtattgctttttaaaatttcaggaccacctgactattacattcatcatagtcatctaccaagtccttgaacatgtcggatttcaattgtgaactacgttcacattagttttgataagagtttgtattcaggtttcccctcaaatatattttggcactgttttctttgcagatgacatgtgaatgcattctgaatgtataacttccttctacctgactgaaaagtatttggtgacaattttaactccttgaagacctgagttgctgtataaagtggatttgttaaattttgatctaccttttcttaagagggagaaagataagaaaattttccagtgataggaatttgtttagtccattagtgcccaggatttctttttgactgagggatttaataaattttagtagctggaagttgagcatattgttcaccgaaaataaccgccattgggacctatcctttgtgattttgaagtgctaataggcgaattattctgaaatattttctcctttttctttttaccaatatctaagggccagtagctttccgtaataaaataagaagccaaaaaactattgaaagacactttttaactttaattttaggtttcggggtattatgtgaaggtctgttacataggtaaactcacgtcacgggggtttgttgtacagattatttcatcactcaggtattaacccatttatgcctagtgttccattattggaacactaagcttgtgggaattattcctatcctactgctcaaggtcatcgccaaggtctgattttcacaaaaagtaatatgcagcctccagcataaatgggttaagcgcagtacccaacagttgtcttttctgctcctctccctccttccaccctccaccctcaagaccccagtatctgttgttcccttgtgttcgtgagctctcatcatttagcttccacttagaagtgagaacatgcagtatttacttttctgtttctgcattagtttgctaaggataatagtctccagctaatccgtgttcaaaagacatgatctcattcttttttatagctgcatggtattccatagtgtatatgtaccatatttctcattgatgggcattcatattgattccatgtcttgaaagacattttctacaaaatggaaaacttttcattcttatttttcctttttttcccccatggataaaattagcttattaataaatttgttatgtgaaatgctttatttcagttttctatatgcaaatatagaaaatgctatgcaaataaaagcaatctatattaaaacactgatatagcaacaggttatttataaatttattttttagatcatatatttgaatgttgtttaatagagtatgatatttttcttacggagataaacatttatattctatattatgtgttatgtggcctgaagtaattaattttctttcaataaggggcaatctgatgaagatctgagcatttaagagggctgagcagttagttgctggtaatttttttggcttccatgaccaaagtaggtaatttgctttagtaaccaaagtagattggtgaagattagtaattcttctgcttaccaacttaaaccaaggtggctttccataggtgaatagaatttttttttcttaatttatgtagaacttttgcagttcaaataagggtttttaggaattgaaacttggtaaacattcagtggtcaagttggttgaatttccattgcattgtaggtcatcagtcaaagagataatgaatttggaaaagttcaaaacaatcttaataaaacagtggtcaatagagttcacacatcattgagcactttactcctttatttttccttttcaaggctttattcttaactagaagtgtttaccctctaggaaagggtcagtaattgttttctgctttgattcttcataataggggacgaacagggaggatccgtgtcctgtcttttaaaactggcatcatttccctgtgtaaagcacatttggaagacaagtacagatgtaagtcgtgtatattaatgctgtattcttttattaatgttggctaattaccctagttctagatgggaaatgacagactgttcttatttgacagcagattcctcatgtaagatgtagaactgcttttagagtgtcataaaatttggtttgtgccattccttgtcaaacattaaattgcaggcatttaagtagagaatgaggattagcttttccagtccaggtattattttacattacattgactgtgtctgaataaaacacatgttcctaggggataaagtctgattttctaacctctttctgtaagtcggaaaaataagtgtgaagatttaatctctgcacttgtctagtctttgggttcttatttaaagaataccatgtgacattcatgttcaagaaacattgtttattttataatcatcttactgcaagttgtactgacacatccaattccgtgacgtgactaacattttattatttgagagacagatagcttgctgtttcttaaaggatagatacgtaccaccctacagaatttccttttgattacgcattgggttcttctgcttaaaaactgtaaaaccaaattaaaagccaatgctagaggagtgatggttcagatgaccaagtgaccatccattcatattgtgaaaggctgcagttggttttccccttgaaatgcttataagcaatcttttcagtaggaatattaaacaaattcagcctagcttgtcttttctctcttcccctgaggcctagccacacatgtgaggagatgtgctaagcttcaggacaggcaggagataaaagccactctgtctcctactgatcatttctccttcaggagtaagccacaaaatacacaaaccattttggccctcacttttatgtagtttccacttgagttttctcatcctcagaacgagagaaaaataactgaacagcttttgttaaccattttaaaatgtatttcggatgagatgggatacctgtgtgcttttctcctttaaatattgtagttacttagtataggttaggttctaatctaccgtatatatggtatagtgacagcacattgtaaatataatattaaattgaataattgaggaagctttgagttggtgtttcgaataactactaagagggaacatgtttttaggttggtgaaacaaaaatattaaatgcaaaatgagatgtttgaaagtaactcataactttgaaaataaacacctaggtatgtatatcggagagcagataaaaagctgtgcgtacaatctcaatttttagtgccatcttaggtatcctgttaaaacatttaatttcctagagtttaaagtgtgcttatgggtacagaaagctttcttggatttactttttttgaggggcaacttctaggtgaatataaggtatgattaaaattttatatctgagaacaaaacataacattgcaagcattcagtatgttcattcattctgttacatatattgggcacctactatccaccgggtactgccattctactgtagatacttctggcacacaactgaccaagatatggttccttccctcaaggggatataagtctcctgccaaaaacgatagacacatattgaatcaatgccagcataacatgatgtgagctattaattagaaatacgcagccaggcgcagtagctcacacctgtaatcccagcacttagggaggccgaggtaggaggatcacttgaggtcaggagttcaagaccagcctggccatcatggtgaaacacgtctccagtaaaaatacaaaaattagctgggtgtgatggcatgtgcctgtaatcgcagctactcaggcggctgaggcaggagaatggcttgaacccgggaggcagaggttgcggtgagcagagatcgcaccactgcactgcagcctgggcgacagagcaagactccgtctcaaaaaacaacaacaacaacaacaaactatgcacagtatcctgtgggaacacatacatgatggactagaagctcagtgatcttatgactccataaagaagtcccaactgtggtacatttttgaatctctggtgtccaaggagggtggtgctttgggccagttatatgtctcttaatgctaaaacacttattttttgatgtagttacatcctatatacaataattcccaaggattatgttctggcttagaagaaatttaagtgtcgagggtacgtgtaagcttgcgcttcttgcagtgacacagtttatgtaaaagttatcacacttcatatatatacagtgatcattaacttgattcataaaaataataaatatccagattagcacaaattagaagtaaccccactctgtggaaatactggctactcttgagaattgctactggaattgagttggatgtcaggttctgctggcatccatgggtgctgtgttttgactgttgcaattttcttcttcctttgtagaccttttcaagcaagtggcaagttcaacaggattttgtgaccagcgcaggctgggcctccttctgcatgattctatccaaattccaagacagttgggtgaagttgcatcctttgggggcagtaacattgagccaagtgtccggagctgcttccaatttgtaagttattcaccttctaggtaacatatttattctttcatattttagaaattaattaaaaaacccacagagcttcgttttctcatattagctcttcagtaggcagtaggtatgggatttgggatatttggaacctctgtaagtaagcagcttctggaactctaggttttgggaaagaagacagtgctgaggaaggaaaagaaatctccatctgcagcagggaccccacagttattgaggtgctagaggggaagaagttcagcaagggaggaaataagtctctagccacagaaatcctatgtatataagaaaatggcctttgtaggcgagtctcttagtctctgagtcctttctctaattctatcattatagcctcctttcaatggctgttggtaaattgttagcacagctgtccttttttttaaaactgtcctttgtagctttgacattcccctattattccaaagtctagaggtgtatactctctgctaatgtccatcactgactgaacacactcttgtccgttctctttcctatcctgtcccattgctttttctctgtcgtagtcagtgccccagaaacaccctcttcttcccaaatgcctgagcactccactggtagacattcatcttgttctaatttttttttctctttccttttttttttttttttcttttttgagttgcagtctcgctctgtcacccaggctggagtgcagtggtgagatctctgctcactgcaacctccacctcccgggttcaagtgattctgctacctcagcctcccgagtagctgggattacaggcgcccaccgccaccccaagctaatttttgtatttttagtagagacagggtttcaccaggttggccaggctggtctcaaactcctgacctcaggtgatccacctgcctcgaactcccaaagtgctcggattacaggcgtaagccaccgtgcctggcctctaatttttattaggtagatagtgctacaatgaacatccttatcgtttagcttttgtctttgaagctttctttataggatcaattctcaggcgtgtgattgccagacaaaataatataaacattttttgtggcctttcttcaaaagttgttctaattgtaacgctatcagtattgaaggagtaagatgctttcggtatcacattattcacagtgttcttatgtttttgtttttggttttttcaagtgctaagagctgtttttcttatgtagggtttctcaatccattctaattctattaacaatggctgagatttacaaaatggaactagctgtagaactaactgggttatatctgaagtctttgaccacagactaggatgaaactatagaaggtttcctgggcagatcactgtgaatatttaggtgtttaaagcagtttgagtatttatttaatagttagttggatagatttaccggatgcacacataataagttcatttatgtaaagtgggatatactgtttgaattattttgccaaaattatggcaaattagttgtaaatgtaaaatgcatgtggagaaataaatatcttttcctcctcatacccaaaccttccaaaatgcagatagatgatcaatccaatcaatcatcaaaatgtagacacaagtaacttccatacaatgaatattaatggccacaggcaatctaggttcattttgattttttaaaatccaattataaaacaacttgccataaacgcgagttatttcctaatcttttggttgtgtgttttttttgttttgttttgttttgagatggagtctccctctgtcgcccaggctggagtgcaatggcgcgatctcggctcactgcaacctccgcctccctggttcaagcaattgtcatgcctcagcctcccgagtagctgggattacagggtgcctgccaccatgcctggctaattttttgtggagacagggtttcaccatgttggccaggctgagctcaaactcctgatctcaagcaatccacctgcctcggcctcccaaagtgctgggattacaggtcctaatcatttttcccctttagtcaagtctcagttactctttgagttctagtgaaacacacacacgtgttcatatatagggatatataaacatatgtgtgtgcattgtgacttgggttaaaggtaaggctcagtgatggtccctgctgcaaagtaaactaggctgtattcagggccagctggattctttgttttctcgcccgagtactgactcatcaggaagccaccaccatcctcactgcagcctctggccctcttggatttggttgtcaggataagcggtggccatacagaagctctgctttccctgggctgccccccttatcaggagaccaacctattccatttctgcctgctacatccttttgctggataacctcctactcccctaagcccatgtctctggtttggttacatttctgtctctgtaataacaactctgtattctcagtctcaaagctttgaattcagtccatccttgcatatttgttgaatgcctcctggttggccagccagtctccaagctctttgaaatgtgaaatgtgttttgttttgttttcagaaggggtctaacttcgtcacccaggctggagtgcagtggcacgatcacagctcattgcagcctcgacctctgggctcaagtgatcctcccacctcagcctcctgagtagctgggactacaggcatggaccgccacgcctggcatttttttggtgtatgtgtgtgtgtgtgcgtgtgtgtgtgtgtgtgtgtgtgtgtgtgtgtgtgtgtgtacagggtctctcgccatgttgcctaggctggtctcgagctcttgggctcaagctgtccacccacctcagcctcccaaaatgttgggagtacaggcgtgagccacggcatccagccttgaaatgttttctatgagactggggggaaatcagtcaagatatgaatggtggtaacaggtggcttttgattttctctgtactatttttattttctgagttttcttctttgaacatttataattagaaaaaaaattagtaaagtgctgcctctttttttagggaaagaaacatgttttgtttgattgctttccattgccattcttacattgtttccaggccttctcatcattgcactggcttcctagcaagcctccacttcacactccagtccttttcattggtcttattgccctcatactagttttagagaaaagcatttcccatatgatgccgtccttgaaaatgtcagtatctttctgttgtctagtgaacaaatcctaattcctctatttaactctcagacctttcctactctggtttcataaccacccatagtttgctttcactatcatgaaacagcttctccttaccatttgtacctattatgcttataaataatattgttaccattgctactaacaaaactttgttcacatgaattctctcatttaatcctcaccaagtctttgaggggaacagaatagtcaggctttggagattttgcttttattattgtttaagtggatgaataatttatttgcgcccttaaagtccctcagctggtggaagggtttgattcctagtccagtatgcccaccgccacatttactacctcattcccaaatatgtagtttctgatacttctgctctccagcttcccaaggccaaacaacagctacttttcctgagtcctggatagaataagaaaaggtataacaagacaggggacccttgagggggaagaggaattagtttgaagtgctggcaaatgtagtatttctaatcagatgctagtaaattccatatgtatggcgaggctttcattacttagatttggggagcctctcagcgttttagcaatttgcaatcaggttgaatggatccattgtaaatacttaggaatacttaggaatccacgtcctggccctggcatgcttttcctcggccaggtgcactggcggtcaccttgcctttcattgtgccacgtgcataaaaatacaatgtttgctgtagggaaagataacaggagtgaaaatgtcctctgccctttgtttgaagtataggaccttcagaatgaggctgggctggttccttcagcaagcttgtgctcaaaggctgctatttctaccagcctgaggtaaacggtaataaagtacttgtttatcctacaagtgcattccttgcattgcagatttgatttcctttgatttcttgtcaccacctggaaaccttactttgtttcaggttggtacagttagaaaggtactgaatcttctgattcagacaagggcccagtagtggcaagaagagaggtacgtgtttgtgtgccacactctctggattatctattaaaggttttctcatatccctccccactaaccacttagaaaaggaaatcacctatcaggtctaaatgtaaaattttgcttatttaaaaatcactataggtcttccaaggaattatccattaagccaggaaatgaagtcacatccatggatatgaaaaaggaatagtcactgtaaatttatggctttgacagtggtatcttcgtagatactaaatgaggcaacaggatatgtttccacattaatagcatattgcagtcaacacatttactgggaaattgactcattttggtagtgatagaagtaaagttttgcaacgagtttaagagatacagctgtaattaatatattgccagcttgttcctttctcatattccatggaaacagccctgttgagagattagattgatttttacgaccttagtaaggccaagcctgccctggcagtgagtcacatagactgcctgaaggaaccttgaggattttctgcacctctcctttttcagatgagaaaacaggcccacagtggcacaatgaatctagtctacatcgtgcaatttacatcatgttatggcttcaaccagttcggagactagattgaaatgacagagtgttaatgtgtcaatgtgatcccctatatgaattttagattgtaatagaatgagatagataaataaacacccctcccccaaaacacatacatgcacacacacccatctttattgaaaatactctaatcccaacatagctgtttagtctatcttcagataaaaccaagtatcacttttaggtgggaaaactatacagtcatgtgctgaagaatgacgttttggtcaatgacaggccatatatactatggtggtcccataagatcaacgtaagaagagattataatggaactgaaaaattcgcattactttgtgacactgtagccattgtaacatcatagcacgaagaattatttcacaaacctgcactgccagtcatttaacaggtaaaaaagtatgttttaaaatatttttaattattatggacacataatagtactcatttatgggttacatgtgatattttgatacaagcatacaatgtgtagggtaacacaatcagagtaattggggtgtccatcatctcaaacattcatcatttctctggtaggaacattcccatttcactcttttagttattttgaaatatacaataaattattgttgccatgcatggtagcacgcacctgtaggaccagcgtttcaggaggctgaggtgggaggatcacttgcgcccaggaattcaaggctgtaatgcacaacaattgcacctgtgaatagtcactacactccaacatggacagcatagtgagaccctatctgtaaaaagatttaaaaatatattgattactatagtggccttattgtgctaccaaacactagatcatatttcttcttactgtatttttgtacccattaaccatcccttttttatcccccgatcttcactacatttcccagactctggtagtcatgattttactctatctccatgagttcaatttttttttttttttttttttttagctcccacacatgagtgagaacatgggatacttgtctttctgtgtgtggctgatctcaacataacgtcttccggttccgtacatgttgctgcaaataatgggatttcattttttatggctgaataatattccattatgtgtttatagtacattttctttatgcattcatccactgatgggcgcttaggttgattctatatcttggctattgtgaacaatgctgcagtcaacatgggagtgcagatatctttttgtggtttcgattttgtagtatcttcttcagtaaacattttaaggactttattgtttagataacgtcaagtataccaactttatattcaatatgcttcacctatgagagctggagtgtcaaaatctgtttattttacatctgttttctgcctcctgttgtacttagtattccaaatgagtaagttgcttttccatctatcttctgaatttctctatttgtatgacaaaaatgaataccatctatgcacagttgttgtaataatgtagaatgatatgaaaatgagaataaattacagtctcaactgttgagaacaagtatttctctgtgttagaaacattcccaattctactcttttagttattttgaaatatacaatgtattattgttgccatgcatggtggcatgcccctgtagtcccagctactcaggagactgaggtgggaggatcagtaacacataaatgagaaagcattccagaatatctggagaagtgactggcagagtggttaagtgcataggctttgaaaccgaactgtgcctgagtccaaatctgagctctgctatttgctggctgtgtgactgtggacacatttcttaaccttcctggcccctgaactcctggaggtgattgtgaggattaaatgaaccaatagaagcaaagcacttaagagctgtagtggatacatagaaggtgcccagtgaatgttagctatgattatctaaagtgtgttgtggcatgaaaatatcctgccaatgttaacagttgcttttatctataacaaaacatcatctgtggattgcattttagagattctggagattctgtttctctgcaaatgttaaaatgccatatcaggagacttttggctggttagacagcattccccgggtcaactgattacttttttttttttttttttttttttttttttttttttttttttttttttgagacagagtctcgctctgttgccaggctggagtccagtggtgccatctcggcacactgcaacctccacctcccaggttcaagtgattctcctgcctcagcctcccaagtagctgggactacaggcacgtgccaccacgcccagctaatttttgtatttttaatagagaaggtttcaccatgttggccaggatggtctcaatctcttgaccttgtgatccgcccacctcagcctcccaaagtgctgggattacaggcatgagccatcacacctggccgattccattttattaatagattttccatcctgaaagtaactcctaaaaaccctccttcacttaggtttcctttggctttttgtgtattaatcagactgtgggccctttggttccatagacattccttttacaccccttttggacggatgaatactcactagtaactaagtaattagtaagagttactacaatttggtatttataaagaggtggcctttcccagaattgaaggtagaccctaatagtccaatcagccttccatagagatagctggctgccatgaaaagctgagagatatcaccgacctcttactgggcctgctcatgaacagttagttaaaattcctgcaattttcagaaaagacccttatcagagtattatcagtattgtcttaagtttaatattggtttccagttgttatttttaaaaattttaagctaccgtgggttaagctttatgatgatctgtttaagtggtttgtttgattaacttctctattggagtaatggatgttttcttcaccagaattttgaagataggtttgtgttgtagttgaaacctgttttgtttatacacttactgctaaggaaaagcacatgtcattttgttttccatcttcatccttctaaagtagcacttcattgttatgaccaaatctttctttcttccttccttcctctcaccctgtcttttccttccttccttcctgccctccctcccgcctctcttcctttcctctcctctcctttcctttctttctttcttttctcttttctttcgttctctctctctccctccctccctctctctgtccccttctccttccctccttccttcctttcttccttccatttctatcacccctaaaattccatcatgctgtatcatctcactaagtcccaatctctggaaaccacagctctgttttctgttcctgtaattttgccttttcctgaactggattttaaaggattgtaggaggcagtagtggaagagctaactttatatcttgttcttttacataatgcgccctgatccacacttgggaaagtatattccatggtacctatagacagatatatgtgctttaccatgtatatgtgaaacttttctaatttaactttcctgttaaattagaactcggtagcataaattaatactgttgagtatacttagggatttgcatagatttaaaattgtgcatatgttccctagggccatggcgttaattggtttattagtcaggtggagtgcagagcctgaggtcaggacagttgtccttgaacatggaaatgaagagtggataatcaccatgtgttattgtttgggctgattttatctttaatgggtgattcagagtcctgattaatatttagagcagtgactgctggcctcctacctgctcattatcttcagaactttaaataaaatacttgatttctacccaagatggtagttatgggaagccttttacttcttcttgtctcacaaagacaactcttgacctctcaatccttaaacaaaaagttctgcttctgcgcatgtggggactcttaaactcattttcatgcctggagattcacatttagggatctaggaaaagcacatctaggcagagtcgatgaggagatgctttaagaaccgtgacaaggacaggaaggaaatcaattttgcgttaggtttgtatttttagagaaaacgaatcctggggaacttttcacactcattactattgacattaataccattgtcctgtccctttcacagttactaaaatcactcttgcccaccctcctgccttgcccacaacctattcccatgaaggggtgacttgggagaaataacggtttccaaccaacgttttattttggaaacatttcaagcacaaagagtagttgaaaggatagtctaaagaacactcatctgtgtcatacatctgttcaatccatggttgcttttcgctctacttacctcctccaccctctcagctctgtttatgtatgtgtctgtctgtgtacatacacacacaaacacattttcccctatgccatttaaaagtaaaggagcatcacaacataaacccctaaacacttcaccatacaccattttcttaaaggatgacattctctaacataactgcaatgctatcgttacacacaaatttaacagcaatccagcaataccctctgatatgcagtccacactgaactttccccagtgccccagaattgttccttatagccactgttttcttccagcatctagtcaaggtttttgtctgtcatgtctctgtaccttcatttagttttgaacagtctcccagcattttgttttcctttcatgacattgacttttttggtagggggacagagtctcgctctgtcacccaggctggagtgcagtggcgcaatctcggctcactgcaacctctgcttcccgagttcatgtgactctccacctcagcctcaggagtagctgggattacaggcatgcaccaccacacccggctgatttttgtatttttagtagagacagggtttcaccacgttggccaggctggtcttgaactcctgacctcaggtgatccacctgcctcggcctcccaaagtactggaattacaggtatcagccaccacgccgggctgacgttgacatttttgaagagttcagaccagttctcttgaagaatgtcccatactctgggcttttctgatggtttccttgtgattagattaatgttaacattttttggccaaaagacgataagatgatgctctgtacctaccactgtatcacaatctggaggaacaaaataacattttgttcctattggtatcactaagaatgttaaggtggtgtctacaagatactttccttgtaaaatatccttttccctttgtaatgagaaagtaattttttgatattttgacatattataatatccattccttaaccttttaccctatggttttagcatttatggatgatccttgtctaattcagttataatattggtggttgcataatggtggctttctaattctaccatactttctgcatgtattagaccattttcttatgtaaagaagagcttctacctctcccccgtctattcatgaatatcactgtggacatccaaggtggttctgagtgtacaaagaatgatatctctctttactgaactgccattggatactatttttgtcttggaattgtttaaaatggcagtgtatggaattgaaagtcctttctccagagagccacataaacagatgtctaataaatacatttccatattaaccaatccttttatgggaacaacacattgacataattaaaacacgtaacatgaaaactgtgctgaattgagaagctcatagagttttgtttcttttttttcctttttgccacttcaatatatatggacccgcacctgtcagtccaggtagctcatacatgccgtagcatctaatggtacgagggacatgtaatgctgaaaagaagggggaaaggagttgatcagatgagatataagtatgcatttatcagtgttgtggggtattcacttgcaccttccattggctctcgcagccatgttatcggcatataattcagttgaagatttatattcacctggaaattgtcctaagtgggccttgcttacttagctatcagactctagtactttcaaacaaattaaagattcaaaagattttggggatcgccttgctttttcccataggaaatcacttttgtcctgtctttttaagactattttaagcatatatttcagtattaaaatcgtagataatcttaagctgtttccttaacctctttgggccttttcttatctgtaacataaagttaaaacaggttatctcaaaagttacttatccctaagtgtctttgattctatgctaaatgttataaaggccgaaagggaaatggattattgtacttatttcaaagcttggccatgatcagcaaagtcttacctgatcttccgggtaacaactcttgtatcagagctataagatatagaaaacagtcttgtacatagagtgtggcatttcacatgagaccaagtgttctctgaatggaaacacacactaagagcaagatgtgaaaaaccattgtgtacaacctcatgtaaatgatcccttgcgtccgtacactatagtttcctcagtaactcaaaggtaaaacccaagtatcttgtgtctaagaggatcaaaatgtcaccttccttctgttttatttgttacatgcaggttttgtatagttttatagagtctttttatcactcatttgattttcataaaaattgggattgtttggaagaagagtcattaatattctttacagcttgttcttgttcctccttttatgttctctgctggtgcagacttctctcttatgtaaaatattccactgatgcccttggtagatttagaggttgttaaagaaattgtaataacagatcagggaacagtcagggactgcctgtcctatactgtctgaccctgactaaccgttctccttgtagttttaaatctttgtgtacagactgtaattcaaaaaacagtttttataaatttaaattcagcaaatctttccaaatgctaaggctttttataacgagggctagaaaagttgagttgtcagctattaatgccaatacctattaacaatggcaatgacattgaaatgattttttggatttatgaagggaacatgttactaatgaaaatagcaaatgaaaatggccactgtattagtccgttttcacgctgctgataaagacatacctgagatggggcaatttacaaaagagagagggtcattggacttaacagttccacgtggctggggaggcctcacaatcatggcagaaggcaaggaggagcaagtcacaacttacctggatggcagcaggcaaaaaaagagcttgtgcagagaaactcccgtttttaaaaccatcagatagtgtgagactcattcactatcacgagaacggcgcaggaaagaccaacccccataagtcaatcacctcccaccaggctcctcccacgacatgtgggaattgtgggagttataattcaagatgagatttgggtggggacacagccaaaccatatcagccacaaaggagagattaccctttttaaaaatctgtggtttgcccacaatgttttccataaatttacctttttctgtcaataaaaatgtttaggaattctatttatggatatgtatgtatttaatatttgcatatttagttcttattttttctctaaatggttatgacctgtactaagtaaaatcaaaacacacacacacacacacacacatacacattgtactagcagacctgctttaccttgcttgggataattatctgccatgattaaataaataaatttctgcaactgtttatcctggaatacactgcatagagttgtcagtttgagaagcaacttgatttcaaatctgagtctacaattttagcgtgtttccttgtgacttctagtttggggcttttaatttcccttttgctctctctaccctcagtttatgaacgagtgtggcatttcggcagttgaataggcctatggtagcctcccagtttctgtgttgtagaggatagttgccggcttattaaatgcccttgcaggactctcagggaagtctgttgtttagtgaatagtgatgaatcaatgtggatttcttagttttgacaagtgaaccatatggttatgtaagatgttaacattggggcagggtttctcaaccttggtgctactgatgctttggcccgaatcattctagttctttgttgtgggaagctgccctgtgtgctgctggatgttttgcagaatcctggcctctatctactaaatgctagtagcaccccctccccgccctccccctcccccccccccccccccccccgcccagttgtgacaaccaaaaatgtctcccgtaaaagataccaggatgaaatcactttttgtcagtcccaaactaactagagccagggcagcatgaaaggaggagggttcatggttacatgcctgagataaagactgtctcaaggactttctaaaatcgccccacaagaaattcctctgttaggactgcagcagtgcacgtaatatgctctcaaaagaacatctgcccagtaatggcatccccactaataaactgacaccagttctggcgttgagcatctgaaacgaactatgtttccaagcagcttatgtaaacttctgtttttaccaataaaagtttccctctacagtctcctcttcagatgcatcttgggttgtaatcctcatttctaattccaaaataaatttaacatatttggcgatgtttttctctgatgttttttggtcgacactccaaacattgttatatttcctctggggtacggcatcatttccggttgagaaccaccgacctagagaaaagctatctgcctgtgcagttcctttcaagggccccaagtgtgaattttgtgtatacctatattttaagccagatcattctgtacataccttctaagtccagatgaagtctgttagccttttatgtgtgataccatcacatagaaaccaacacaaggacatttactgtaatcgataaaggaaattttggacagtttgagaaagtaacttattttgtcttctgctctttataaaatctttacaagtgtatgtttttgctcttcaggatgactaggcagctttttaaaattctgacttcatacagattttataatcttccttttatttcttgcgatcatattgcagttgaattcccacccactgttcaattcagcagattttaacagagactccagaagtatagttcctgtctttaattaatctgcaatttaggaaagaaattaaggaggtatcgttctgtattgtttccaggatggtggtttcttgttatctgagaattactgggcacagtctcttgcccaatgtttacttctctatatagagttgacccttgaaaaacatagatttgaactgtgtgggtccacttataagtggatcgttttcaaccaaatgcgtatcgaaaatgcagtactcaagagatgtgaaacctgcggatatgcgttcagctgggcctactgtgggacttgcgtatgcgtggattttgctgtatctcaacagcaaaatccccgtgggagtggggctgcggcgggccaggaagcaacccctagcatatactgagggatgactgtactaattattgtagtttattaagtgttcacatggttttcacaaacctcacaattgaaatgccaattgccttctcctaaaaaatacaatgtacgtgttcatggtagctgggatgcagggcttgctgagaaatacttaattgcatttcttctgtagccatgaattgattttattaccttgagagaaaaatgagtattcaggtggacctcctggcaggcggttggcccttcagtgtccaaggatttatagaaagcacaacatcaaagaaatccaaaagttcttcggaaccccagcaactctcctacctccaaacttgccatgtaatgcccttttaaacttattatattgataggtaaatcggtttgctagaaattccagatattgagaattctttgtctgtgtaccttgttatatttgtataaaggtgatatttgtatgaagccaccctccagtgtgctgtaacagagcaatagtaatgacaactgattccttcccctagcttttctgttatggatagttgctggcaggtgaggaccaacagaaaaagaggagaaacccaacataattccaaactgtgaccatcataatggaaggagctgtgatagctttgctttctgtgtgtgcatgacatagaaggggaaaatggagttattgccaaaacaacagcaaaagcaaaacaaagccaacaaacaaaacaaaacccagggctaaatgacctttccaagagattttgcttgcatggcttgaaactggtgtttagagatgaggacaaggtcacccttgatactgagaggggattatatctgagacttatatgtatctcaacaaataatggtacttacaaagattatctcagtccagtgaatgccatcatacttatcttttgaccttaataacttcctgctattccaatctatccctatatatttttttctggaatgatcgaaatgtaattttagctgggtttaattctagttctgttaggtctttacagaagcttgcctggcttttaattctttccttcttcattgccagacaaaaggagagggaatataccactaggatacagagtagtttgtcataaaaatgaaagattgaaacagaatgagaacgtgaatccccgtaccttgtcttcagtctgtcagttggcgtaggtgagcagttttaaaagagccaacatgatggatcttgcatcttaggggctagaaatttgagaatgttcaacctttaagcatagaagaatctatagttttttgaaagagtagaacattctacagcctcccttggtaattcacactaatgctttaacaactttcagcatcaggaaattcttccatatgagctacagcctaaattcttcatgctgcttaagtctgtttcttcttgttctgtcctcagtggagagatcgaacagctggtcacaggcccctatgcgagagccattcacataattgaaaactgttattaaatcgccccttcagaagtcactcttgcttgttctctctctctctctctctctctctctctctctctctctctctctctctctctctctctctctctctctctgagaatctgggaagattccagagctgattaacatgttgctttactgatgaccttctcagcttttaatatgttaacgtgctctaagaattttaagaggcagatataatgtgcactgtttctttcattaatttgaccttctcgtgaagcattttgctggacgattgatctgctggacatactgggaaacactgactcagagattttagttgagtaggaaccgtgtgtgagcctacggtacagaacaaaagaaagtaatccagttacactgtctggagaaatagaggtacattctccgcaatcatatttgaagaatagttttctaaatgacaatggcaaactaagccgtgtcatatgaagaagaagtaaaaagaataggaatgaagaggcatggacagataagacagctctggtaaaatatttaaagggctgttcaaagaccaagaacttctgggttgctggtcagatggataataataatgacaataacaatagcaaacatgattcttgctatgtgtcagacacggttccaattgcctttcatttgctgactcacgtaatcataaaataactctatgaggtaggcactattaatatttccagtttgtagcagagaaaaagtaagacacagagagataaagttattttcctaaggtcacacagccagtgagtggtgaactccagtggtttaactctggaacttctatatgctgtgctgatggatttcagctcaatgtgatgcagcacttttgacaggggtatctggacacaggtgttcaggatcaccttctaaggatgtttcccagctctctcacatgggtggtgtagtggctgtaagcacacactggcatgggtaagagtttggactcgatgaatgctgagtttggactcagtgaatcctgaaagtcttacagctctgtggtgccatgccaaaaggatgaatggacttgcatgatctttttcatttttagattgcataattctttataaacttttttttccacaaagtacctctgtgatggaactctacacagagaaaagtgctcagcaacagctttttaaaatttaacttgtaagttcaggggtacctgtctaggtttcttatgaggtaaacttgtgtcatgggggtttgttgtacagattattttgtcacccaagtattaagcctaatacccattagttattttcctgatcttctccctcctcccaccctccatcctctgataagccacagtgtgtgtttttcccctctatctgcccatgtgttctcatcatttaactcccacttataagtgaaaacatgcaatacttggttttctgttcctgcattagtttgctaaggataatggcctccagctccatccatgttcctgcaaagaacatgatctcattcttttttctggctccggagtattccagggtgtatatgtaccacgttttctttattcagtcttccattggtgggcatttagattgattctaggtctttggtaaacagtagcatttgatcggaagtttgaactgataccattttgcagctaggaaatccaaagttaaacagtttattatagtgttgctaaatttagaattaggggtaatgactggagtgctgttgaggtgatcagtgttataagccaaatgacctgtcagtctaaaccctcctgcctttctatctgaaatgtggatatgtcctttattaggaaaccacattacaagagaagcaacttggctttgcagctcaaatacccatgacttgtgtgatactaagtattcccatgtcatatattcaactgaaattggctgtggaataagtaatgcttcttggttcttggcaaaagcaaaggagaatcatctctggagaaagcacttttattctaggctcaagcttttatttatctctagaaaatattggtaaggtcagtttagtacgtggtaaaaaaaaaaaacaaaaaacatattaagcacacaagaaatcaaggtggaaaaagaaagaaatcaaggtgaatgagaaccagaagaaatagcaaaccatagaagcagacctacgataacatcatattccagaattattagacagattattttcttaattgtgtttatgcagttagaaaaataaaaaacaacattgaaaaatatctacagggaaccacaaacctgagaagttaccttaaaaatgaccaagtagtatttctagatgtcaaaagtacaataatcaaaatttaaaactgtatgggtttacagcagaccggcaagagaaatggatacccagacagtaaggcagaaggaattaataagaatgaagcacagaaggatgttttaaaaagatgtggggcagagaggggggaactagggaagtcctgttcagagaaatatagattgaagaagagtaacatttatgtaacagagttctgaaagtagaatggagagggaatggagaagaggcactatttgttgagagaatgacggagaagattccacagctgattaaagactctaaatcacaggtttaagaagtccagtgaatcctaagcagtctaaatcaaatcctagaaacagcacaagatagaaaacagatagattatctttattttttttattttatttttattatactttaagttttagggtacatgtgcacaatgtgcaggttagttacatatgtatacatgtgccatgctggtgtgctgcacccactaactcgtcatctagcattaggtatatctcctaatgctatccctcccccctccccccaccccacaacagtccccagagtgtgatgttccccttcctatgtccatgtgttctcattgttccattcccacctatgagtgagaacatgcggtgtttggttttttgtccttgcgatagtttactgagaatgatgatttccaatttcatccatgtccctacaaaggacatgaactcatccttttttatggctgcatagtattccatggtgtatatgtgccacattttcttaatccagtctatcattgttgggcatttgggttggttccaagtctttgctattgtgaatagtgccgcaataaacatacgtgtgcatgtgtctttatagcagcatgatttatagtcctttgggtatatacccagtaatgggatggctgggtcaaatggtatttctagttctagatccctgaggaatcgccacactgacttccacaatggttgaactagtttacagtcccaccaacagtgtaaaagtgttcctatttctccacatcctctccagcacctgttgtttcctgactttttaatgattgccattctaactggtgtgagatggtatctcattgtggttttgatttgcatttctctgatggccagtgatggtgagcattttttcatgtgttttttgcaaaggagcaacagtcatctttactattgacttctcagcagcaacagagatagacgaaagtggagtaatatttcagtattcaaaaacaaaataaaaacaagaccccaaaacctttcaatcaaaaattttatacttgggccaggcgcagtggctcacgcctgttatcccagcactttgggaggccgaggcgggtggatcattttaagtcaggagttcgagacctgcctagtcaacatggtgaaaccccatctctactaaaaatacaaaaagtagccgggtggggtggcgtgtgcccatggtcccagctacttgggaggctgaggcatgagaatcacttgaacccaggaggcggagattgcaggagccgagatcacgccactgcactccagcctgggcaatagagatagagtcagtctcaaaaaaaaaaaaaattgtatttaatgaagataactatcaggaatatggattttttttttaaaaaaaggaggtattttcagacaaacagagcttgagaaatgcaccaccaacagctaaaggaaattctaagggacatatttcaggcagaactaatcccagatggaagatttgagatgaaagaaagcaatgaagagcaaaaaagtagtcaatatataggtcaatctatctaataatataaaaaattaaaacaatcctatagggttgaaaaaaacaaggtataattaaaattcatgaatatagtaacatataaatcaaatggtggtattttgagattgttgagatcattgtcctgtctgggatgaattgtatttcttacatttagactttgaaagagagagaaatagagaggcagacagaatcaacagggcatcatgaaaacagcgctaagccaggaggtttggattctattatcagctctgctgctagctgtatggcctttgaaaagctccttttctggtctacaaaatcagtttgcttgtctgttagatgaggctttggaaccagatgaattttaaagcccctcattatgattctatgagaaacagattctctagaaaaaaaaatcagttgtccccctcctttgaaattttatcagtaaacacctgcatttcacttctggctaacttttatgtatcagttcaaaaattaaagctaaataaagtctcgctcaggtgtgtagtttgcttacctttctcgtttgttggttttgttttcttttcttgtcatctagtagccaaaaagagtaatggcagtttaccaaagccttaggagtgggtagctctttggatatcagggagcatttgcagaaacaagctgtgaaaagccagcctagctttgcaaccattgttctttctatcttttctgtttaacttattaatcgaactgatatacacctcctttgccatcttgccttctttcctttcatccttttgccctccttctctctccctcctgtctttgcaggctaataataagccagagatcgaagcggccctcttcctagactggatgagactggaaccccagtccatggtgtggctgcccgtcctgcacagagtggctgctgcagaaactgccaagcatcaggccaaatgtaacatctgcaaagagtgtccaatcattggattcaggtattaggaaccaaaaaaaaaatgtcatttttttctcatcatttttcacctttttatgacttgatcttttatctcctgtgccagttgctgttagttcgtaccgtctccaaagtgggagagaaggtgattgggctggaacatcgatcattcctgtcaccctcctgatcgctaggttattttggtggatctcacttattaggctggtgtcccttaccaccttcactcttcagctcttcggagccacatttttggttgagcaggccaaagtgcgtgtcttcacggaggtattacagatgaactgtacctcctccttcctggaaccaaaacatttttaccatctttcctttttcacggtctttcctgtttatagaaacttcccaagaatcagttataaaactgagagatgattctattctgggaggaaccataatagtagctcagtctctcattcactttgcaccatttttttttctcccttaagtaacaagaattgttttcagcatcttagaacttgcttctttatctgtgaatctgattacattctttgtatagtatcccagtgaacttctaaaggaataaaaagtaggcaagtaaatggaagattcacaaagcagctaaaaaacaaccagtccttatacatttagaagtgaaagagataggaaacgtagcaggttattctgatagtcttaaaatatcatggaaaacaaggccaaataaatctttagccctgctgacctgtttggggagacaggatttttttttaaatgaattaatctcacttaacattaatcctaaatcctaattctgaaactgcgatgtccttaaatgtgtgaatcaacatcaaggtttctatagtgatgaataagccacaaagttgtaaactagctctatggtctatgcctgtgcagaatccacttagcagcaaagtaaacactcttttccagttacgtgtgaactggttttgttactttattttctaataactaccttgtactgttgcgtgctttttattcatagtgcttttttacttttggtgtttattgttccatagtcatgctgtttacaaagaggttttacaaaaacttttagaggtttctgaagcctagatagacaacagtgagtaggtactgcttgcaaaggtcaccttctttccttcccggtttcttggcaggtaaaaatgataccatgggggtggggagtggggaagggaagccacagtgactgcattagatttctaagctaccttttctctgcttccttagctagtgggctttgtatacaagggaaatttttataaaataaagaagaagaatgccttggaggatctgaaagagcactttcaccttcaattcttttgcccttatcatattatattattttaggacccagcacttctcattcctcctgtccccctcttgaaagatggctggaatctaaaaaagatagctttccttcccacttccccatatgtgacataagaaatatgtttatttgaattggctaaggttcttatctgagaaagcaaaaggcaggagagtatgaaacaaagaatatcgcattctgataatggaggaaatgtaccaactagtatttacagattataaattcttccatctaatccaaatttcatgttctcttggggcttcagttatcatttgtaggtaatggggtgagagatttctgaagagatagagataaaagagttcattcgagtaactgtttgaagatgaatcgtatcagtcaattagaaaacattattaaagcgagacttgttttaattgaaagttcttgttcacatttcttttgtcttgtgaaattgctttatcttgacaatgttttgaaaataattgcttcagaaaacttttgtcccatgatgggtaaggggcatgcacagcgtaagtctgtcgctcctggaagttcttttaaatttgagtatttggttttcaaaagactggaaattttccagtaccttcctacttaatctcaaagagttcctagtggagtttaaataaaagctgagtttttcttccctccttccatatgtttataggataatctttctgccaaaatgttttggtactgtaggagaggcaccggaaaaatctggaggcagaaagttaatcacttaccttgtgggactaatgaacattgctttctgtttctcaaattagaacgtggtagaaggtttattaaagagtgttctttgggaatttgattcgaagaaatacatacgtgtttgtttttgctctttatcaggtacaggagtctaaagcactttaattatgacatctgccaaagctgctttttttctggtcgagttgcaaaaggccataaaatgcactatcccatggtggaatattgcactccggtaagtttgacgccagcctgacgtgagagttagttcacctgggataaatttcagttttgtacaatactgcagatcatgtataatgctgtgatttgtcacttccccagatgttccccagctaaagtggctctcaactgtaggcttcaggatttaccctatccctggtgcctaggggagtgcctggcacatatggaacatgatagaccctcaataaatattgttggatgaataaatagggttttcattctgtgtgcatggttgtattgaagacgttttcacgtttattttgcacagccttagaggttgtgtggggcgatcttatggccatgaggcatgttgagtatgggggatggttctaggttcccccaaattcataaactaccacttttaatcaatgttgctcacctattatctgtcctgtatactagtgacattttaaaaatccattttatatgctaacacttactaaatgctaggcatttaccttttaaactaccctgtgtaaaataagtactatgatttttatcccctctatacagatgaggaccctgaggtcctgaggttaaataatttactcaaggttctataagtaagagttgaagccatctcctaagatgttattttaggaaaatgttaagtggccaatagaactgtgaaaaatcactagggaaatggcaaggatgtagacttggtggccagacagacctgagtacaaatctgcctaagaattaaagacaggctcctctcaggtttgttttttctaaaataaacctgtccctgttgactgtagagccacccttcgtgtttctcttctctttctttaattcttacagtctcctcttctctaaactttgcatgcttgctattcaagatacggtctgttgactaatcatcatatgtctattggcattaccttggtctttattagaaatgtgaaaccacaggccccaactcctgatgctctaaatcaaaacccacattttagcgagatctgcagctggttcccatacacaacaaagtatgagaagctctgctttagagcatctctctcttccatcatcagagtgatcctcccagatatttgcctgtctcacttttattcctcttatagagatggtcagtgattgagaatgtaccatgctatgaatagaccgaaatttagtgggtgaagcatgctatcattttgtactaagtagtttttaaaataccataaagtgtggtaaaatttaatgtcacctttttgaccttaagacctataaactaccatttattgagtagcctagtaagcttgtatgtttcttttatttatcataacaacgtgttgaggtgttgttgctcccattttactgatgatcagagcctctgagaagtaaataactcagccaaattagtacatgccaggcctggtttcagagccccatttgtctgattccaaagcctttgctcacaaccacaacactctccttaattacaaaacaagtgtcatggggcagaagactggagtggtcattagttttgaaatcatcctgtcctaaatctgatctcaccatgatctcccttttagactacatcaggagaagatgttcgagactttgccaaggtactaaaaaacaaatttcgaaccaaaaggtattttgcgaagcatccccgaatgggctacctgccagtgcagactgtcttagagggggacaacatggaaacgtgagtagtagcaaaagcagaacacactcttgtttgatgtatatttgaactcctctcagctgaacaccctccttcactcccaaatgcaaacagtctcttctatttctttctttttatttacattagctgaaaagagaaaaataagctgatgtccagttgccactttcccacgtcacttgacaatttctttttccaaaagttaaactttatctcacagggggaaaaaaaaaaaaaaaccacaacacaatacagccactaattgccttacaagccttataagaaatatgggactgtttacaaatgagtgattccagtatttcattttgattttcctctctcacaaatcagtaaatgtgtgtctttttgtatctcattgtgtggtcatatctagtcacttgtttctactcaaaagaaaatatagtcacaggaaactacttcacagtaagtagtaatgattctcaagatcaaaggggacgtcttcacctcttttcaacctgctcctcttttttgccttaactctgatggcagtcacacaactgtgtgtttttcttttaattcactttacaccttggtttggctattgctttccatggttcatacttaattggctggattttatttattttgacctttcagtaaatttttttgcggctgagtttgcgtgtgtctccttcaccacctcattttttgttttgcagtcccgttactctgatcaacttctggccagtagattctgcgtgagtactttttttgctgaagggtgctgctaccaccaacacattcgctcgcttggttctcttttgttctgtttatttgtttgttttcttttgttttgttttgttttatggacatattaattccccttccttcatttcagtttttttttttcttttcttgatgagactttgaaagtaccatctacacagatcaggagaatcagagtgggttttttggttcctccaccaggtgaaattcaaaccagcagaaatcctggcttgaattcaaattataatcaaagaagttattggagttttagctgtattcctgggagacatgtttatatatttcttcatataaaagcaaggaagaagcttctgattacataataacattctttagccatatttcttgagattcgatgctttttagaatctttagggtctgttataagtggactattaaaaatcagcagaattcgttttaaagtatgatgctgagtttggttgaataattttaatgaggtgtgcggactgtttatcaggttatgccatgctatttgactaatcattatatacaagggtttctaaattttgaactaaactcactttgctctcctctccaagctaaatattcagctcataaacaattatacatttgctctaggaggaaagtatttctttgttattactattggtgtgtattaataatactgagcttagataccagcagatgatttatctcagagtttataatgctagaaaactcttttttggggcctgtgatttctatattagcaaacaaagtgcctattttaaaactacattatgtagggttgttataacaaacttttggtatttcaaagtatgctttattaaaatatttattgaaaatcagacagctctgttatggataaaggggaaatgaccaattcggaagataagcttgtgtaagaattcaatttctttttattaaatcttttttattgttccaccatataatttaatctaaactagatccttttttaaaaaccctgtcgtgataaatgcatattattaattgaggtttattttcagtctttaataggcctaaaggaagtggaaggctatgctttcctttttaaaacttcgttattgcgccccttaattttgagatatggtagctataagtagtatattatctgatttatttaatcatcatgcttaaagaacttagggagttatttaggttcagttatgtcctctgcctcttggaaattgtgtttcctaacccaggtagtctgttatagaagttacaaccgttcataaataagaaacttttaaagagttgatacactacagtttcagcttgattggatcctgataagggaatggatttactctatgtggaaataagtttaaccgagtaagaaatccaaacgacaaatatgctaaagaacagttgttacaaatacatagataaaagtagcaccaaataataaacaaagagtaattaatagtccttgaaaggcaaaaaggagctacacgtaagctaatgagaaaaacattatgacaatcagattaacttattttaagtagaagattttgtctgtcttaaacgttgaaagactttaaaattaataacatcttttatttaaaaatattttctaacaactaaaacacacctcccaatttgcctttttatgaagagttggttagattattcagaaatagtgggaagttttaattttgaggaagaaaacaaatctagcagactgaagtctgtgttttctttaatagcagtaattgtatttaaagtatttattcataggattataaatactgtataaaatatattacaaagccatcctattcaggcataagagccaggtcctaacgtgtttcattttgcaagacttgtatctaatgttaacaaatcctatgatgattacaatatttgatccatttgatatggatcacagaatttgaaagtttccagagatacagaccgtttggttttccttagactaaactcttatttgcttgtgtttgtcatattactttaaaactaaagctaacataggcctttacgttgtctgtccataagtgagccagtcaaacgatattctttgagcgattctgcattgaaacctaaatgaatgtcagcttttaattaatagagttttcataaaagagaaggtggtggtgggtgggatggaattgaccaagtaggtcattaactcttatagtaagtaatccttctgggtatatggttttgtgtttaggaagtgggaagcggggaacagtattattaccttcttttggaagtgttttagaaggctttgcacttagttttgtttgtggactaagtggctttgtattttcactaattcttggtttttaaatgattcatctctgaccagtactcccttttggctcattttctggtttaataaatgtctcttttagtgtatattttttaagatttctggttattgtaagttcttgtgcttatgcatgctgtgataggcgccactgatattaataagaaaaataacatggaattatccttgaggcaaagaattaaagctctgtataagattttctgtataaaatggtattaaagtattttggatttatatgcctacttttcttggtgtacttatgctccaaggtcttaggctttcattcttgtacacacttccaggatagcaactattacaagggaaaacactactaatgtattttccctgatggtaggctttttgcttattaaaaaaatatgtaattgaaagactggtctgttccaaaagatagttcttataatacaaataatccaagtattaatttatcttgatctgcagtgaagatttcaaaacagaccttagcatttttctaataatgggctatgccagggttctagaagattaacagattaactctccaaaactatagtgaagtttcacatggaaatctttggatctgcttattaaattgagtagtcatcgttttgtttcctcttgacaatttaaacgtctttataactcatttcaatttgattatgattacacttgacctagatgacattggtttcataaataagacctttctctctcagggaagaattccatttccctagttatttgctatagtgtgtcgtaattatcttactgtagtatattaagaaatatgaatttctggcacattttctaatgcaagcttagctactggtaactgcatctttttcttttttaatgtaagaagaaacaaacacattctccttagtgtttcaaccaagtccttcaacgctacttggacactgggctaaaccagggtcctctctgaattacattatcgttgacttttggatttatgcctttacctaagggctttctgtgtcagcagagaaatggaagagaccttttgtgctattccaattaaaagaaaaagtccaagcctaaactggttttcagaacagatggttttttttcctaaggttaatccaaaagatactataaaaacttcaaggataattaatagatcagatatgaaaggatgaaaaaatgttaaccctaccagaattctagcctatggagataagaaaagataggtgtttatatacaaaaagcatatagactattcctgctaatgatctcctcttattttctcacctatgttttagcacacagtatctctaagaaatatttcagatatcatgacgttctatgaaatttagtcattcttttttaaaacctcacaatataatccagggtcattctattttgtgctagaaattagtggtatagtcttgctgctgaattggaagatacatttcttctttacaaaattgcatagatcaagacatcttgatacatggagttttaagaagtcttgtactagagtagcctctttgaagctaaaataattgtaagtatctaggcagatatacagctttgatccaataagaagatagcctataaatggcgcaggtgtaaactatttaaaattttaaaccacatagggctaacacaatttcggaattataggatgtgagaaattacaaagtaggaggacaaaatgcttcctagaaactgtctcccccaaccttttctacgatgggaattttccagagaagattttggcctctcttcatggcttttaataaaagcagaagtatgagaaatcatctctcaatcctggattttaaaatacttgataatatttaagatataggagcaactaaatgtatacattatccatagaattagaataaaagcattctaggccatgtgtataacataactgtgtggtgggttttttctccattaatggatggtatctgtgactaatcacattttctgccttataggcctgcctcgtcccctcagctttcacacgatgatactcattcacgcattgaacattatgctagcaggtatgagactagttgtatgccaggcaaatattgattgaaataactaaccaaggaaagctaacctatgatattttaaacaaatcttttctttttttccccaaacttgtctgattcctactaatcaacttgccctctaacgtgcatgccgttccactgcatgttgtttttggtcaccaacaagagcattagtccagaataatcttccctaaccctggcttttaaacatttccggtagccttgctatgtttttttatactgagcacatttactaaattggcttacaaatagtttaacctccttagaaaactgctagaccagacattcatatatgaaaaaatgatactatattatatggagaatatgaaagcatcagctttccgtttgtgtatttattttacatgatatgctgtaaagaagagaataattaattttcctaatccttggacttttctgtctcaccttctttgtgtttgagatgatttttatacctaaaaactgaattactaattttaaaatattttatgcttgttaaatccgtaagagtttggttaacttttttagttgtaaaaaaacaaacaaacaaacaaacaaaaaaccccctgtataattgcctgaggtgaagaagattttaaaggtaaaaattggtggcagaatgtttagagagcttactgtgcatccatcctttgtcaatattctaactgctggacatgtttaccaatcgtgaaaagcattagctagctgtgtaagtctgtcatcagtggaaagtagtaattgtcctaaaagacaaggggtagtgtaaggtagggagtgcacttattgttagggaagcttttcttctgaaaacaaagacctgttctcagtgaaagcaagactgatctgtagggggaaaacagtgaaatataactttccttagaatttctatcataaatgtagtgctactaactagctgtggtctaccacacactgcctcaaatggttaagccaacacacacatcctttaatttgaaggattcctttctcttcttgccatgatttatcctttagttttcaggaatgttcgattaggtcttgaatagattctaagacgtcacataagttttaatgagcttttacgttttttatcaggctagcagaaatggaaaacagcaatggatcttatctaaatgatagcatctctcctaatgagagcatgtaagtatcccatctctttttacaaaatgttcctgacaatgaaattgctttgagggatttagaggtaggatagcacaggatataggaattagcatcatattcatttgatcttttaaggagccattcatttacttttttcctttaattcttaatgccctggcatggaatgagctcatccaaattctggcattattagtattcagagtagcaaaaatagtttgccttactcttatttgaacttatttcataccatatgattacaaattgcagagtcccaagtatttatagtaatgcttaatctttgaccaaacctgccagatatttaaagggataggatattaattttaaagtcatggctaagtactattttctccactcatggggagtggaaacgtgatcttggtatagcatggctattcacatatggtaggttagttgggcattttccttcagaaatccaaagaagtagatttttgtgatttagcatcttcacaagataaataaagtgaggcaatcttatgaagagtttccagaggagaagtaccaattcaggttgcaggttgttagcaggatgataagccaaccctgttaaactttaaggacggagatagagcggtgctaagagcagcagggaacacagctatggcagggaaacaggcttcattatagagtgagggcagtgttcacaatacagagcacaaaggaacattgccatgaaccaagtaaatgctgaccggggcttgaggtagagagagcagacattgaagcaaatatgaaggaaaaaataaggatttgccaagtgaataaataacataaagagaagaaatctagtcaaagtattacgatgcctttttagtttgataaagtaaggatatctcacccatcttggagaatatagacaaagggaagaatggtaaatttatcatatgtagttggtgtggcaacacaaagtcatgctcagatgagaaaagaaccttcataaggattaggccaaaagaaatagtatcaaagtggcatatatataactagttattgaagacatgagaataaataatctcatctggtacataaacgatcaagctaataataaagaatcaagtcaaccctcagtcatttgtatatgacttacttccttcaaacaaacaaacaaaaaagcctttccccaaccataactgtgatgccttatctttcttagctatgggaaaaagtattaatggtactaatatataagatacttcaacagtaaaatgtgtggccaaagaatcagccaaatgtaaatagcttgtgcttctttggctcactgattttggtattagaagctctagcacattcagattaattcgagttgtatctacgtaacagtggctgtcattcattgactgcctaagagaacaggaagaaaagtgtagttacaactctaggttataattaaacatgggaagttctagcagtacaacttcagaatttggaatgagtgtgataaattaggtggtaaaactgcttttgttttattttaaaataagctttagcttattctgaggacataaaatccattttgactcaatgttggatggcaaaaactcatggcattttaggggcaggtttggggaagtggtttggtggattggttgacttcacttaaatgtgtgtttttaatacccaataattatttttagtcagcttttcacatctaaaccaggtaactggcttgataaacaaaaataattcaaatgagaaggactttttcctaaatttctgatatttttcaacttaagtgggtatggagaggagaatattagcgtatcatcttaatgatatctaaccagaaacaatgagctttagcctgtcattacggacagaagaaaattcttataacttggaggtaaacaggcctttccggagcttggagcaatgcattcagaaaaaagtttgtcctgtgtattagagagttcctagtttccaggaaagattgtagctgcctccccaaatagaagcctttttgcctccttttcccgcaagattagtccttaaaaccattatgtataaatttaaaaataaataaaacttgtatttaaaaaaactctgccccgaggaatgagatgttcagtcttcttttaatcagtcaccttaatgtcttttttccccttaattttcgttcttctgtctaaacaataactgaatgaaacaatcatgtatctccagtttaattgttgttgtcattctgcctcaatgacttatataagttaaaactgacttactgaagcaatactttttggttacattgccttccacttaataaaatatttcctctgttacttttagagctgcaaggtattttttcctactcagtacaacaatagcgtgggttagtgaacagattatcttgacaggcttggtggccaaagcattatacagccattattatatcttttaatattttttagctattgactaacatcaacgtagagtcccagtatttctgtaattctgcctttcatttatccgtgtaaataggccaatcaatttcatttgaaaatctgagcaagaaaacactttgaattggtaccagtagaatggtagatcacaacctcagcagtatcaaaaggtctttagaagcaggaaaaaaggtctaattaattgttaagagcaaataaatgtttctattttcaaatacactcctgagtccctaacccccaaagcaaaataagggggggaaaaaaccaaaacctttgattttattttccagagatgatgaacatttgttaatccagcattactgccaaagtttgaaccaggactcccccctgagccagcctcgtagtcctgcccagatcttgatttccttagagagtgaggaaagaggggagctagagagaatcctagcagatcttgaggaagaaaacaggtgagttttctttctagctttgtcattggtatgcagagtgcatacacttgcacacatagaaaagtgccaggaatcttcacttagagtcattttatgtctaattgttttctaaaataatctgtttagctccatttgcagattctctctctcttttttttttttgttatctgaaagaagacaatggatgcaatagtatgatgaagaactcatattttaggtgtgaaggagttaatgctgatggtggtatttgacttgttgcatgtgtctccaaggctttgattttatatttcagaatagaatttaagaaaaaagtaggttatttaattttatgattatatgattttttttacatgtgtttggccatattatctacctcaaacatttaagaaagtagggttattggcttggtcatattgggaaaccaattgtttcatcttatttttcatcatcaaatgcagaaattattatttatgctcaccatcatagcaggttagtgagacaattccaattgtcagccatcacctgtaaaagacagtcatgtaaaaatagcagaaattgtagaagagaaaaaggctaaagaactctcataatgactgcagggaggacaaagatgtaaacatctggggtactgtattgtgtcaggataatgcaaatcattggactttcagttctgtattacatttattatgtcacaggtcccttggtttaaaaagtcttctcacatgatcacttctaactcacaatgtgccttcttcagacagatgccaccaagcaaggatttaaagtagatgttgctcagatttgtgggtcttaagtactttcatctctttggttgagcccaaggcaccaaaagctcttaacgtaggcaacgcagtgtgtctgagatcagtgccctcgggagtatgccacttcaggatgaaaaaacaaactgccactcttccattgcttcctgctgccactgcgagccttctagctcttaacaccttttacctatggccatagctccttatctggttggcttccctttagtctctttcccacccttgcaataaatcctccatactgactctacttgtacatcttgccagaaccaagacccatcatggcattcccctttcactggatttctgcatgtagaaaaaaatcaagcttcttagtggggcgttcaaacccttccacaatattctcttgacttgctttttctatgccatcttcttttgttctccctgtgttctggctatgctgttgtagctagtatttctgaatacatcctgctctcatctacctttggggtcaagctcaagcttgagtctcagcctaactgctaacctctaacccaccactgccgtatctgacaaaggaatcccacctatcctccatcacactgctcaaaataactttccccatggagccctgctagatccctgcagttggaagaaatctgtcttttgcctctattcccagagcactttggacctttctcagaaaattccttgacagttttcctttttatcagttattaccagtgcctctctttaatgagctagtgtgtgtctttggggcatggactgtatcttaatcatcttcatatcctccagagtacttagcatggtttgaatatttaatggctactcaggaaatgtttgctaaaaacctgaaaatacagcaagaacatcacatgagtaccatccacgagataatattgaactttttttgttgttttaatgatagctttatttttggccgtacttttgagatcatttgtcagtgaagaccatggtagagaaaacatttctactttattgagaataatcagtaatatccatttatgttaaatctgtaattattgtaggggtcaaagtcaaatcggaataaaaagttggaactgacactgtaaatagaatttgatgttaccaaggagtaaatatatttttgaagtatatgatcgtgtaatatatcttttgagctcattggtcaagagccctgcctcgtttgtggttagcatagtctttctccgtaccattgcacccgggtcaaagaatgtttgtaaagagtactgataactatcatttatttatcattttatcattttgagtgcacttttacatattttagatcatttaatcttcttacaaacgctatggagaagagactgtcgcctttctgtgaatgagacacaggttcttagaggttcacacagcttgccccagatttcccagtcagccagtggtagaactgaattgaaatccagatttttctgactctaaataggcaactctgccttcaaccagataataaagaagagtaagtctctgtgaatgtcatttacatagaattgcggcatattccccagaatgtgccttaacttgagggactatctatgaggactgagtgtcccggaataaacctgttcatctacttgtggcacagcgataaccgctttaccctggaagatatccaagaccattctccaagaatgggatggtttgttctctaaaagaacaaaaaacataacaccaggcctacttagagctccaaaatgaggactctggggttgatgcaaatctttgtgtaagttaccttgaccttcacgaaatgatcaggatgagcttccttcattgtcccttcattttgtcctatttgaccttctaccaaattccaaagaaatgtctccacagagttcccttcctgaaaacagcccgtgtgttttctttgatctgccctgtcctgtcttcttgcagttctgcgcaaggagcttcagagccctagatttgccttcgctacccttgaattcagtgttgcttaaggagcctttaatttgccatttcctgttgagaaaacccaggaattctttagatgccctctctgtgcatgtctagctggctatgtcctaagtcagcattgggctacgcaatctgacaaatacgagcatacttttagagaaaataagaaagtatatttaaaattgagattgccccaagtcctttggatgtgtacttattgatctgttaatatatatattttatgttcctttagctgtgatttatctccaaataacagcaaaagagagaggcctggagagccccattcctgactagatatttattaaattccattaattgttcttattcatgacacctccctacaaccccctagaaaaacagaggatggctgtttgagaagtgtctcagaggtatcttatctctgcctttagaattccatttctcctggttgttgcacatagtattcaataaatatttgttgaatgcattaatgaataaatgaattgaagctgaatttattttaattgtagcatacatgcatgcacttttgactaaagttcttttacaaacctaatttcgtagagaaaagcctttcaaagactttgttttctgcttgcttttcaaaattctcccctttttcaaactgccttgattagcaccaggcatggctttgtcataaatttagaatgttaagaacccgttttccaaatcacaggcactgtatgtatcccacattggtgttctctgattcttggttgatgccacagagataaggctaaagctctgagtaaaagctaaatctgactgagtttttcccatagtgcctcccataagtttggatgactaatggtgttagtgagatatctaatctttaatatttcgcttctgcatcatatttctccctcattaccacatataattcagatacatctttatttggcaaagagccactggatcttgggtttttgccccattgtgtgtccttagcattgcagactcaaggtttacttttttttcttgcgttgattaaagccttcagtctcctgacttaagcctgtagtgttcaaatacagagatgtatttgtctctgcactgtctaaataaaccaagacttgctctgaaattcaaggtatgatcctagcaatgaaaaggtagcctttctgagagacaaagacattgtcgttctactacctgcagagcaaattgattagattgttctcaagtcaacaaggtggctaaatattaacctaattcaccataaagtctaaagttaaagttgttagtagatgttatataacacgagggaactctgtagattcttaatacctactcaggacctttcatatgtcttgttgggcagtaagaccttatgaagccaaaatttgagttttctctttttcctttaaattcctccagtgattgtgcaagattattattgttacagtcaaagaagttctagatcagttactgataccactgaattaaagtagctggaaatcatgatcccgttgctttactttgtaattgacttgatgactttggacctagtctagtagctatcaatcttcatagctacgggaaatctttattcaatgttctttcattaggtctttgtgcaagtctccaatgatggtgaaaagatggccaaaatgaagggaatctgaagaggttaggaatgggcattcctatggaatataaacaaaggtgtcagggtgaggaatggcagagtttgtttgagggaaactgcagttgtattaccttttttaagaaggcaaagaatgagaggagatgaggctgaccaggtcagcaagggcaggtcgggaagggtgtggtacccactgcagagttgctgcctccgtgcctagtctagggagcaactcaagggtgtgatccaggagtcaggccatgatattgacatgaatatacgccacacaggcagctgtgcggagggtaactttgaaaagagcgatgctggaacgaggaaatcaagctggggggagtcacatgggagcccaggaaagagatgattagagccttaagtaaggtgatagaaatgaagtagacaggctgatctgagtgatatttcgggggaggatagagctgtttgattcggtagttctgtgggactagggtatgaaggaatgattcccagggctggtaactacaaaacaagatgatagtagttatttgcagctgggactgataattcaggaggagttgcagcaggtccatcctttaatgcagcagtgtttattagaggtccttcctgaagggctgagtagctggaaggtgataaatgaggtatggaagaggtcgagttgaggtcctggtgacatctccatgtgtaaatgtctgacagtctgagagatagaactctgatgcttgtagaaaggatataagcctgagatattaggactgtgagtcgccagctcacaggtggtagttgaaaccgtgagaatgaatttatatatcccgggagcatgtagcagaaggagaacactggatttggtagaactccggaagatgtgaacattaaagtgtgtatttaattacttttatttttagtagagaatacatgtatattattatacaaaatccaaagggttcaaaaagacatatagagaaaagtgaatccttctccaaccttctcccctggctgtggtgtttccagctctggaggctgccatctttcttggtttcttgtgtttccttccaaacatgctctctacatatgcaaatatttgcaaacatatttatggttgttggggttacttcacacagtgtcgtgcagtgttcactctggttttctctttttacttaaaaatctctaattttcacatgctggagaaatgtgccagaagaagaggagggcagagcttgggaatgatgggagcattttcccacaggaggcaggagagagaagggttagggaactaaagtatgggaggaggcgtgaccttgaatgagaggaaggactgcctctgaagacaaagtggtaggtaaggaatttagggtaaggaagggaggaaagaagcataatggaatgaatgttaaaatgtccagtagacatcactggaaataattcaagactgattcctacggctgttcccacatgtttttaaagttggagtggagaggaaagcgtggtatatgatacatttaacgaaactaggcattcaagttacttggtgtattagtccattttcatacggggcaatttacaaagaaaaagaggtttaatggactcacagttccgtgtggctgggaaggcctcacaatcatggcagaaggtgaaggaggaggaaaggcatgtcttacacggtggcaggcaagagagcatgtgcaggagaactgccctttttaaaaccatcagatctcatgagagttactatcacaaaaacagcatgggaaaaccccacccccatgattcagttacctcccactgggttcctcccatgatatgtgcggattatgagagctataattcaagatcagatttgggtggagatccagccaaactatatcatttggtgacatgggccccaaaacaaagggctacagagcccttcttgagacaaagggagctagtttgatcacagaaatcagaaagccaagaccttttatggcaaggatgaataagagctgaagggcatacatgccacatttaagaagctgtgtaagaatggggtcaaccatctcagctctactcaggcagggaggacaggaacatggtagaagtggaatcaccattattcacagactcagtttctaactagcagggccagtgtaactaaatttccttcagtttatccaaagttaattgaagtctgaggggactgattcatagtatgcagttcatggcagtgaatggataacccagaatgaaagtttatttctccctttatcctaattatctctctttttaactgccttgtattaaaatgttatcaaggttgccttaaagcttttttaggaggagacagcatctggtttaagtgcaaatactagatctattaaaatgaggaatatattcattttttcggcacacagcatcctgtgtcttagaatccagtgtcttaggaatcacaataaaaatcaaattgtgttctggtgagcctagaatcttggcatctaaaattggatgtttgtgaggactgcttcatactacaaaaaaattgaagcacccctctggcgattagaatattcacatcttacaagtacagctgccatctccctagaacatgctggataagagtttatgttcttacaatccaatttcccttttttttttttttttttttttagatttttcatgaagaccctcatcctcctgttggccttcatttgccaattgtccctctacagtagaattgattatggtcatgagtttctttagctactttccaggcctgaggatgtaattctgttcaattctgcagatagttactgagtgcttaatgtaattttaaaattatgagactacaaagatgaataagccttggttcttaccctcatggagctcaaaatttattttaaaaaagttaaaatagaaacaactacttatatcctactgttacaagtgctctgggggcacagaggtgaatgatttattctatcagagggagtagagaggcctttacaaagagagtttaagagttgaagactgaatgggagttttccagtctgagagatgggggaaggatgagttttccagactggtggaccagtgagtaatgtgtggcttggaatgaggagaataagagggcagtgggatggtaggtggggactactgtttaaaggactttgtgcatcatactaaggagtttgggttttatcctataagcaggtgaacagtgatggctttttgacgggggggaggattgagaaaaataactgacctggcagaaagctaaagccatgaagattggtagaagcacagtggaatagtccattaaaagatgccaggttcttaactaaggatgtcttaggcaagtgaagaaggggatggagaaattagaaggtcactgaatgaatgagaccaagggaaaatggagagggggaggcatctggtgttacggaaagttttaatttgggaactgggaaatgatcattgaaaaacaaacaaaagcaacctagtgcacccaggaaaaactcctgatttgcaaagggttagtgcatggagagaaagagctacgtatcagacatactgaattctatttgcccaaggacatttcaagtggaaatttcctatgttgattttacgtattcagttttcagaaaggattctttaaaaagtcatagcaatacaattcctgcaatataaataatagatcaatgaacatcatagggattagcatagttgatttgactaagcttcagattcagtttgagcttccctgtagccagggagataataggaaacaaagatttgtctgtctcttaatattgaattaaagaagcacgcagcatcctaaagaaacatcattgttttcctggctctacgtaataataataataacaaaaatagctgtcctttgagtgattgctatggacaggaactgttctgagtacatatgaactcctatttaatccttaaaacaaccctatgaaagagaggctgtttccagaggattacgtggcacagagtattaaggacacttcatatggccagcaagtaataggacctgtattcaaacttgggtggtggtcctgaactcttaagcagcgttacacttgaagtgattattggctagtgtccttatcaacatttttataacaaatcccaagggaaattatatgtggctgtttctcatggcctttgataattgtggaaagcttaacattaaaacaccaaagatagggtgacagttctccaaggataaaggtcactgttgcctaaaatgtattctgcagaataccactgagatactctgagaaaaaaaggattccaaggacagtaaaactttgaaagcactcatactggaaagtcatcattacgttagcatttgcactgaggagtttggaagtgaagaaacctgattagctttgtctaacctcatgttgctcccacttacttgacctcgagcccaactgcaatgttatatggaacacactttggtaaagaaattcaagtctgaagtaaactttgaaaaccagtctaggagatagcatagttgactctctactgtagttgttgagaagcctatccgttgtgtctctgggaacatcagaagataaagctataacaggtgcccacgtaggaagcctggatttttcgcacaaaagtaacttttcatatgctctagtggtgaagcagttaccctgtagacccagaagccagaatgatttagtctgaaaaatctaaagataggtattaaattaactctcatgatcatagaaaattctttgcaccatttttgtagaatatcccaccgaataacttggcttttcacccaaaccaccaagaaaaattgccaccagtgacttgatgcaattaacttgctatcgggagttctttcttgtgaaatgattgaactttgaaagatgtttaccaaagacagcacctttagcttcatcacaattactgtggaatctttctttgtaagtagttagatgcaaaggccagttgttgcttgaggcctctcctggattgtgattttaaagtgtatcatcaacacatgggaagatatttctccctctttatcttatgacagaaatgcaggtatagctttcatctcaaagtaagattaaggtataagttacaaagatgtgtagctactatatggtcctgtgtaatgctacttgaggaaggctgttcctttcctggcactgaaattttagagcttgcataatcagtatatcaacctcgtgtggcttggtgcttagcaagtttcagcttctagagcccatggctaatggagccatccaggagaatgttggagagataggtctgaagccttagaagagaagtcttgattaaggagtaatgagttgcgggaaggggtcatggttgtggcggagatggaagcctggggagaggacagagacctcctaggaagagagtttgtgtaagaagaagaccaaggacctcctgatgtacttgattgtaattgggcatgagcagcccagttagaaatggtttcctgttggtattacatatgtacatggatggcttctgcagatggctaaactcacccattttatttttttactatcttaatagttaaaatatgaccttttcttgtgtctccaaattctgagttaccttatggtgctagtctgtctgttgtaactacaagtcataagtaaatccatatgattcttttcctgtaatttcctggtaaatcaaggcgataatttcaaagataaaaatctgtatttttagctttagcagtgagcatgattcccagtctttttgccttcgagtaaggtttgtttccatggtggaagtaaacaatatcccacactctagaatgtgagctcttcaagggtaagggacagtgtcctacatatatctttatctccacagcactgggtacataaatgtgtcataaaaatgaatgggtaaatatcctttggagtttttctgttacttgatgggtttttggggttgattttcaggtatctcccttgtttttctcatttcttacattattttctttcccaaaatcccttaatatacctgtttagtttgtgatgtcattttccattagactgaaaccatccaagttgtttaggctaacccagacttaagcattttctgggcttatttttggactctttttaaaactcatcatctgaaaatatttaatgtccacacggataattctgaagacatgtgcataccatttttcttttatgtacatgggttaaaccttgatttttccatagtaggagaaagcattataagattttattgttttcactggggtaatatcttttgtgctataagaaataaaattttgaatctagaacttagttttttataagacctttattgagatataattctcgtaccataggagttacccatttacagtgtattagtcactgattattagttaataggttaaccagtattagtaatcactggttattaattacagagttgtgcaaccatcagcgcacaattttagaacatttttatcaccccccaaaagaaatcccatccccattttcaagtcactcctcgtttctcctgcaactactcttttcagccctagcagtagacaatccctgatctactttctgtctctatggatttgcttattctggactgttaatgtaaatgaaataatacaatataaagtcttttgtgactggcttctttcacatagcgtaatcttttaaaatggtatctatattatagcccgtattagtatttcattctttctttaatgctgagtaacatttcattgtatggatataccacattttttaatctattcattacttgatggacatttgggctatttctacttattgtctgttatggataatgcagctatgaacattcatgtacaagtaccggtaattattttaaagaagttattctgggctgggcatggtggctcacacctgtaaacccaacactttggcaggctgaggtgggaggatcacttgagaccaagaatttgagaccagcctgggcaacatggggagataccgtctctacaatttttttttttaattagccaggcatggtggctcatgcctgtagtcccaactactcaagaggctggggctggaggatcacttgagcccaggaattcaaggttacagtgagctatgattacaccactgcactccagcctgggtgacagagcaaggccctgtctcaaaaaaagaaaaaaaaaaaaaagattctatagtttctgtcattgtaatagaggaggccataggatcatatatggcaagagtatatagcagtgcatgccagggagtgaaaaataggccatcaaattgaagttactgggagaacttaagactaagtctaactacgcatgagggattgaagccgggacacacaaagcttaaaattatgattcttctagagactgttacggctttttgctgaccacagacaatgaaagtttgatattttgctgtatttgtctgaaaatggaaacacacttttcccaatggcagtattcctgaggactagagttcttcacctctaaaacctctccaatcctagtttttccttttggctgatgatgaccagccactgccatttttgtcttaggttttgttagtctgtcttatttccagttataagtggttaaaatttcttatgaattcttcttgtgttgaacttttgattaatacatttagtctatagacagtaatgaattagcatctgatcaggaatttgtgaaaaacatctcagtcattaaagattaagaaactgaagccaattaatattgtcatgttctgtctcttggaacttgagcaagatacagatctacgtgtcaatgacatatccagaaaatagactccacctagatacattaaccctgtacccttggtccacatattttatttcagcaatgatccatggacatattataatttgacagtttcatcacatacctagcgtattgggtcaaatcaaggaaatctcatcctagtgatcttaactcagtgatttcattttgcccagatgttcagctgtgataaactttactaaggcacagatgatggatgatacacaataattccaaaatttgggggtggctacaatgtggctaggggctagaactcaggtatctacaggacaaatactgagtgattagtcactttctaagcgctagatatgcatatgttctgccaagctcagtaggtctaagtagattgcttccatttcagataattaagtgctttctttttataggaagtttttagcacatctgaggttctaaatccaaaaagtaaataatatatagagaaagaagtaataacaataataatagtaaccaacatttattgaacacagtatgggctgggcatggttcaaagaaagtttgacatatagaatgtcgaccatactggcttaataatcctcataactgaattagtgcttaagtcagttgcccagcctcagcaagcagcagaggcaagtaagtcataaatcaagatcttctgaatccaagaccatctctcaagccttgttctaattctctcctcagccatggatggtgaaaggcaccacaaaggcagcgtgtcaaaaagtggcattgttcaacctttcccctgatggggcaaagcttttatttttttcctttacgttctttgacatctgttttaaaatgcagatatcactagaagaaatgacaactttattataaaatcccagtaaaatgtaaatgtcttatataaaacctttatactgagcaaatttcagtaggaaagggcttggaagtaaggctctgaatgttttaaagggggacagtgctaagaaatgattagaaacaagagcctggaggggtcctgccatttttactgttttgcttaaggctgacctaaaatatgcatagtcttacttctcaccctgtgagcttatccttattaatgtctttttccacctagtttaggggtatttttgaatttgtgtttgataaagatgtctaaagctgtactgtaaaattttattgtcacttttttttttaaatggagtctccctctgttacccagcttggagtgcagtggcatgatcatggctcactgcagcctcaacctcccagactcaagcggtcctcccaccccagcctcctcctcctgagtagctgagactacaggcatgtgtcacgacatatggctaatttttttcaatttttttgtaaagatggtgggggtgtctccctatgttgcccaggctggtcttgaactcctgagctcaagtgatcctcccacctcaacctcccaaagtgctgggattacaggtgtgagccattgcactgagctttattgtaatttcaagggctcaatgcaatttccagtttttaaagttcatcttgcttgcagaatttgtctttcatttaaaaaaaaactgctgattggctacatttatagctgctgtaatagttctgtatgatttactacatttgcctgaatttagattggtggatatgatttagctgcttttaatattatatgagggtaaagccagatttctttggatctattccttttagatggcaatctttgtagttgttctactttacaaaataatccctgtgtgtgctcatgctttggtatacagttaaatgtatgatactgttaagaaaacattgatcactggaaagtgaccttcatttctttatttcataaatatcattatacaactatataactacacgtagtagggaagctccatttaaagagtagatgacttacactgaaatcatttgacctttgtaaattagtttaaattacacagagattgttgtaatgttctttatcatacataatagttacgattgctagagaggcactcataaatcattgctaaaagggccagctgctttcatgttttcagcaggttgagttaagggaacaagccttgccaatttgattaatctcttatgtccattagttggttgggaagtttttttgagtgtaaatttgtatgtagacaacagagtttatattctttatgacataaaattaatcagatatatctacatatttgtagaatggggggattcttagctctatagagaataagaaatactggatggaagactttttttaggatgactggctacaggaagaaattgtagtgacagaagccatgtgtattgaatttgaattaatgttccttagggagctaccagagaaatataatttacaagataatcaagaacgtaaatagattctctgtggagtcgttgtctgatcactgacatatattcatctgtattgaaatgacttcatgactacattctaacaattagagaatcattaggggtgagatgtacgtgtataccttcaagaaaagcaaaatatgtattggtaataattgacagctgttaaaacgagtgcattgtgtacttgttaaacattagaggctgggcatgttggctcacacctgtaatcccagcactttgggaggccgaggcaggcggatcacgaggtcaggagatggagaccatcctggctaacacggtgaaaccctgtctctactaaaaatacaaaaaaaaaaagccgggcgtggtggcgggcacctgtagtcccagtgactctggaggctgaggcaggagaatgtgaacccaggaggcagagcttgcagtgagctgagatcgcaccactgcactccagcatgggcgacagagcgagattccgtctcaaaaaataaaaaataaaaaaataaaaaaaaaacattagaataacttaccttggaacagtaactctgagggaaccttgatcatttatgagaatgatctcccctacgttaatactgcatcaaaactaacattatggtatacctcaaaaagtattggcatagatgtttttaaatataagaaaattcaaatgcgtaattgataagggctaaatggctcaatttcccaacccctaacaaaaatatgccctaacacagctctgtgactatgactgcatttattagaaaacatttagtaaaaatcatctctagttcaaaccctccagcatcagttcttcttgataattctcatgaacatttagaaataccttaaaagagaattcagactcaaatcaaaaaaccttatttcatttggttgcaggccaagatacctcttttaaccatttctggcttttagaatccttatcatgacagcttgtcctatctcagagcttcaggaggaaaaactagtccctcaaaatcaagtttgctattgagcttaataagaggtttctgtatgtcatatgtttgtttagaagaaaagcacttgttcgactcatttaatcctggcctgatgaattaaggcttgaattaatactgagggaaccttgactatacatctacaaaatcaatgtgtcctggtaggcttctgattaagataacattagctcttgcttgaaggcatctttctctgctcctaccatttatccagtggtagataatatatggagtgaaaaatgaaaaagacatagctgggctttaaagcaagatgaacatctctgtgaaccagaaatgtgaaagaaaaaaaaaaaagtaagtggggctaaattagtgggctttcagctcgtgctgtagtaacagggattaaaattctccttacaaggtagtggcccaaagccaggattactatttgaaatcagagccccacaaaaacacacctagagagagacacatacacacttacacttaaaagcaacatgaaaagaaacagtttgctgcaagggtctacagcttatatgcagctatggccctaatgcatagagccgagggaagaggcaaagattcgcagttgggaaagagagcatcacagccttgaaaccaggacctgaaccaatctacctactgcctggcaatgaaatgagtgatatctctgtatcactcagtgtaggagctgcaaactaccaacagatgtggctctaaactctaagcccctgggtatggctgggagaagccataaaaccacctgagagagagataatgagtttaaaaagagaggaaaatattaaagtacacacacatgagaataatagaaaacatacacatgcatatgtatgcacatgcaaaacatcccttgcaaaatttgtctccaaatcacgatccaaaatacatgaagaaatgggatagcaccccccacccaagttaaacatcaaaaagtgaattaggctgggaacagtggctcacacctgtaatcctatcactttgggaggccaaggtgggaggactgcttgtgcccaggtgtttgagactagccagggcaatgtagtgaggtgccatctttacaaaaaataatttaaaatatattagccaggagtggtggtacatgcctgtagtcccaactactcaggaggctgagataggaggatcgcttgagcccaggaggatgaggctgcattgagccataattgtgccactgcactccatcctgggcaacagagtgagaccctatctcaaaaaaaaaaaaagatgaattaattctagaagaaagcaaaataatacactagtacaacaaagatttttacttacatttaagatgctcagaccaggtgcagtggctcacgcctgtaatcccagcactctgggaggctgagatgggtggatcacctgaggtcaggagttcaagaacagcctgcccaacatggtgaaaccctgcctctactaaaaatacaaaaattagctgggcatggtggcaggcacctgtaatcccagctactcaggaggctgaggcaggagagtcgcttgaacccaggaggtggtggttgcagtgagcggagatcgtgccactgcaccccagcctccatctcaaaaaaaaaaaaaaagatgcttaaaggcataaataaggggtaccactcgctaaaataacaagaaactaagaaacagagatggatgaaatgtaactaggtctgaaaacaaagatatctttgccaaaaaaactagtcattgaagttactaaactcaatatacaggataaattctagactttgtcctgtcagagaaggcaagggaattagaagatgatgctgagaatgttactgtgtacaacactcacagaaaaagataagaaatataaatgagcaattaggagaaatggagaattgaccacaggctctacaatataccttactagaatttagaggtttgtttaggagtgtatttgagaggtttcagaagaaaatggaggaaatggtagagaagtaatatttgaagctgtcatagctgagaatcttccagaattgaagaaggatgtgagtcttgaaggaaatgtgctcccaagagaaatttcaaacatctgggaaggaaagaaaggcctgcattgagcaattgatattctttacagctcagctttggctgattaaaatgagccttttctgttttcactggaaaccaccaaaacagaaatgtaatgtgttgtatataccaaaccatgcctcttgaacaagggtccttataaataaatcataaaagaagagccctgtggacaactaaacccacaggatcaagataccaaggaagatctctctagaaaaggcagtctcctgtcagcacctttgtgaaaaataggtgggaagacagtaatggcttgttgtaccatcttgaggtccatgtctaaaaactgttttcaaaaggaacaccatggctgccccaatctggtagaaagaaaaatttgaataggattctacataaaaagtgttgccagttagaacattttgttgaagttttcttttaatgaagagggaaaaatagaaagtaattcctatggaatgagaccttgtgaacattggatactgcttcaagttcacagaaacattgaactgattgccagttaagttctcagaaattagatttaattaatgtggacagttacatacatcggtgcacacccagaagacccgtgtgcagaatctgactgaaggtgtacttacttcgatgaatctcttctcatcactgctttgtcaaagcagattgctatgaaataaactatacaaacaactacccttgaaggctgatagcaataggatttcaatcagtacagataggagattctatttctgtagatgaaaaagatcatacattgattttctgtgtgactttaaataaattcctggaaaccttgtaatgttaggtactaggtagaatgaaaaaaatgaagcaaaacaaaacaaagaaaaaaaccagagtagattgggttttctttctgcttccatgtggagatctagccttttgaaactgagcattttggaagacatgccgtcccctgtggaatgttcattccgagtatgggacaacagaaaatatttagcagacctggtgatgagatgatcttgctttctcaaactggacaatgggaaaactcttcttggctactcactacttacatttcatctcttttctcattgatatagatctcccacatttgtggataggaatttctctcacctgatgaaatatcatctgtgaacaacagaaatctgtcatcttattttggtatttatcacaagtagaagaaagatgtcaagagttctaatcagtcactggatatcaaatatcagaaatgtcctcaattggaattgtattctcagtaaatcctaaagcatttgggaccttcacatgtgctaatactgtttatatttatttggaaattaaccaaatataaccaaaagacagtggaataaccatagaaacctttaaatggaataaaatttatggcaatcaacattattaggaagaaaaagtatactacctagaaacagtgcaagaacaacgaggatcttctgtgcatctaactatataggtctagaaatatataaagtgaattatgatagaattaaaaggagaaactaacaaatccataattatatctcaacactcatctaacaaaaattgatagctacaaataatcaaaaattaataaagatatggacaattttaacaacaaaatcagcacactatgtatttagagactccatctttccaatggaaaaatacacattatttcaagtactcaatgaacatttttagaaagtgactgtgaactaggtcacaaaaagaagtattgctaaatttcaaaggatcagtatcatacaggggttctctgattgaaacgcaattaaattagaaatgcactaagaagtgaaaatggaaatataaccactgtgctcctaaatgactatgggttaagttaaaagaaatcacagtaagaattacaaaacataaggcactgaattgaatcaggtgatgtatataaaaacttttggtatataattaaagtggtaccaaggaggaaatgtataaccctaaatgtgttcattaaaaataaaaaatcaatgacttattcaacctgtaaagcaagaggaaaaaaaagagtaacaagtaaaacattattaatggacataaaatgagaccatagtaagtaaggagcttcactgcattcttggatgtgaagactcaattattatgaacttagttcttcccagtttaacctatgaattcaatgtaattcaaactcaaaatttcaacaagcattttcataaaatcagaaaaccaaacactaaaatcatggagaagatcaaaggggtcagaatagtcaagacaattttgaggaaaaacaaagtgggctgagaaggcctatcagacatcaattgatttaaagctggagtgtgggatctaccagggatatgcagatagaaccacagactagaatacagagctcagaagcacacctgtatatttatggacacttgatgttttgcggaagcatcgttagagatcagtgggaaatagatggaccatacaatgaatgaggctggcttcatagtttatccatgggggaaaagtaaaattagatcgcatgttcacggcaagcacaaaaatagattctgggtaaattcaagtcctaaatgtgaaaaaccaaattttaaactttaaaatgtaggtgtaagaaaagattttcgtgaacaaaacataaaaagcagagaacatacagggatatgttaaaatttacatcttttataccataggatgccataagcaaagttaaagataagctacactaagataagggtagaagatcatatttgccatgcacataactaacaatggattagcatctagaacatatccaaaggtttaaaaagaaaaagacaatccagcaggaaaatgggtaaaggaagcatgaaaagccagttaacatggaagaagtctaaccttgccagtaatccgggatgtatgtgcaaattaaaatgcacccatcaggttaactaaaacttgaatgtctgataacaccaagtatttggtgaggaggtgggccaaatggaaaacctcattcactactgaagcgagagtaaattggtaaaagcaccgatttgtcacccagagcgattcggtgacatgtagcaatgttgaagatgttgctaagatccaacaattccacatcaaactatattctgtaaagaatctcttcaacaggtatccaaggagataggtataaaaaagaatttcattgtatcattgtttataatagtgaaaagttggaaacaacctaaatgtccatggacaggaaaatgttggcatattcaagcaacagaataataataccttatggcagttaaaatagcaaactattatgtatcgacctggagaaatctccaaaatggtgttgaaggcaaaaagcaactcttagaatggtatgtatattcttaaatgtgaagttcttaaatttaaagtttaaaaacatgcaaaataatgttattagattgaatcacataaaatgggtgtttttgtaggtgaaagaaaaatacaggcaaacatcagcatcttttttaagctcaacctagtatttgttgatacattcatggtaacactgggcatgaaattcagtgtggcattatctccttgagggcagcggggaggagagaatggtatggtgttgaggcgggcatgtgagggagcttctgctttggctgttaacttttctttcttcaaaaaacttttgaagaaaatatggcaaatgataaacttatcaaggggaggtgataggaacatgggtatacttactccattcttatacatttctgttgaaaatatttgctaatgtttagagcaaaccaaagtgttgatagaggtataaaatttttaatctcatgacattataaagaaatatttacaaagtgattaaatcctttgctgcttacttatctgaacataccagtcgcgaggcttttagtgtaacataaaaaattgaaaagcatggctcccttcacacaccaggcaaaagcttcaaattttgttttgttcttttagcactggtaagattgtcatcattaaaaccattcattagtgcctcttttgcttgctgttcttcggtggcagtcagatgcatctatctaccatggtatataaaatttggtgatgatattcaaattactttttttcttctttttctttttctttctttttttttcttttttacttttttgatgccaataggaatctgcaagcagaatatgaccgtctaaagcagcagcacgaacataaaggcctgtccccactgccgtcccctcctgaaatgatgcccacctctccccagagtccccgggatgctgagctcattgctgaggccaagctactgcgtcaacacaaaggccgcctggaagccaggatgcaaatcctggaagaccacaataaacagctggagtcacagttacacaggctaaggcagctgctggagcaagtgaggagagagatgggatttttacaaacattcatttttccctcttaaacaaaactaaacctcagagagcactttttataggtgcaacaagcatcaattcttaagtgcttggtatgtgcctgcaaagtgatagtatcaaaggatagaagtagaggagatagaaaaactagtgtgtcttttttgtatttgtccaatattgtttcctaccaaaatggttttttcttgaccaatttgaaatacatcttggggaaaaaaacgcctaaaggtttccactagttctctaaaagtgaatatttcacttcttgaaatggaactatttcatttacaattagttatattttctggtatacctttgtgttttttttctcctaatccctaacacatagttctttaagcctccatcgaaaacctagcaagatactgcattgtaagaggacctacctggacatagttctggctttctgggaattttaaatttttcaattatgttctctctatcttgttacttaatacttcacaaagatatgaatcttccattacagttttgagatctcacatagtctcatcattcacacatgaccttctaaatcttccagttatttaatgtaatgatgtatagtctcattccagtgtagctctgatttttttctcaaatttataagggagcacaattcagatacaaagacagtttctatggattatatcaacagtgaaatatcccaaattaaacaatctttgggagggcttctaaagtaggaagggtcaaaatttatgagtcctgagtgtgtatcatattttgaaatttatacatttgtatgtttattatgaaaagtaattctgttttcttttggatgacttagccccaggcagaggccaaagtgaatggcacaacggtgtcctctccttctacctctctacagaggtccgacagcagtcagcctatgctgctccgagtggttggcagtcaaacttcggactccatgggtaagtgtcctagctactctcagattttgttgtctgaagaaaggtagagtcgtattacagggacatgaatatttggccgtaagtgtttgactcatcttggtatcagggagccactgaaaatcatataccaggcgaaaaaagtctaaaaagaaaattctaaaaaggtgtattctggcagctctatctggcccacagaaaacttgtataggtgagaagaccagttaggaggcaattgccaaggccaagattggtgagttctgagggcctgcacttgagagatgtgggaggagaggactgtgagactattctataaaaatagacttgccagggggctgggcgtggaggctcacgcctgtaatcccagcactttgggagggtgaggtgggcggatcacaaggttaggagttgaagaccagcccggccaatatggtgaaaccctgtctctactaaaaatagaaaaattagccaggcatggtggtgggcgcctatagtcccagctactcgggaggatgaggcaggagaatcgcttgagcccaggaggcggaggttgcagtgagccaagatggcaccattgcactccagcctgggcgacagagcaagactgtgtctcaaaaaaaaaaaaaaaaaatagagttcccagggtctggggactgagtgcaaattgtaagaagaggaatgaagggagaggatttggttggaagaagatagtgaaacttctgattgtggacataatgtgtttgagaaattgacaggtcttctaagtcatgtcccaaaagaaattaagatacagatctatacttgaagtaagtgggcaaactggagagatttgagaatgagtttcatagaattgattgctgaagggtgtgagatgagaaatctataaaatctataacacaggtgcttcgatccagtgccttggaaaagacctccatttgggtaatgggatagtaaaggatggataagtagggaggttcaaggaagatgtgacaaaaaggtgaaatgctaaagagagctcaatggaaattaaaataaatcacagtccattgggtcactataaatgcattgggtaattttgagaaaccattttaggccaagagaagggaaggtggaaaacttctgtttcaatgaaatgaaagactaggtaatcttaaaatgaatgaggattaaggaaagtgaagacaattttgaaacattaccaagtaagaaggaagccttaggcaaaagttggatgaatttgttgaggaaatggtccacatgttctgttctcattcttagcaatgttctctgcctaggactaggttctaagaaaggtggagctgatgaggcataaatgatcaaaggtcaaaacaagagtagggcattttacagtggtaatgaatggctaggacaggggttcctagccagctgctcattggtttttcctgctgtgtctggctagacaatagagggttttatgaaggccacaaatacttggtcccccttcctcatttctctttctctgtaaaggcccagtaggagtcagctccatcctctctccttacttttccctgggacctaaactggttatatacttggtcctctcaaatcttacctcacagaatagaaaagacctgtgactccttgattccatacacttacagctctattgcctgatatgatgatgtgttcaggaattcatttcatacttgagctcttccatgagggtagaataaagggaggcaaagtgccttaaccaaaatggataggacagaaaggaaaagtcaggggtgtgggtgagttttatggcgaaaaatttggagatcacagtcgggaaaattcaaaagttggatatcatggaagtaaaatactttcaagcaatttctacatctaacatggtgcctcccagcgagctgctgaagattttacttggagatcactgaggggtagggagtacagttcatggagttgatgagaccaacgttgctgagcttatcagcagaggggtgaggtccagatcctgacgacagtggtagatcaggatggaaaagatgttgaagaagatggacgagggctctgaggagatgaacatttctgaggaaagagacagggtagttgaaataaatgtgatgaagttcaagaacctggagcagtgggaagaggcacatcctcctctggagaagccaaatcttgtaggaaagccaggttttgatttttttgagaaggaaaaggatatgtttgaggttattttcctgaatttactacacctccatgatttaaggcaatctctgtgtcagattatctccctccacctgagatctgaatatagctaataaactgttgggattgtaaatgacaacacactacatgaaaaacaactgtatgcatttgcaaagtctgtaaattctgaaaacaactgagctttagtacctcttatttttttctacttcaggattttcccccttttttaagtaagtaaagcatatgaaactaagttacatattttagtggtcagattcagagccctgggtgcttagaagcattaataattatttaggtcgttgacaatggcgaataggcagcatactcgttaaagcactcaaattaaagtgcacattaggatgtggtcctgatgatctgtggagctaaaaagatcatggtagaactgaataccaggacaaaagtgctatattccaatggctaagctaagagataacttgctggcataaaatggataagctgtgttaaatttgtcctctgaaagaaaagactgaattcaagggtactttttcttgaactgtgtattaatctgttttcacactgctataaagaactacctgagactgggtaatttatgaagaaagaggtttattgactcagttccacaaggctggggaggcctcaggaaacttacaatcatgggggaaggtgaaggggaagcaaggcatgtgctacatagcggcaggagagagaaagcgaggggagaactgccacacttttaaaccatcagatcttatgcgaactcactatcatgagaacagcatgggggaaaccgccgccatgatccagtcacctcccaccggacccctcccgcagcacatggggattacaattcaacatgagatttggatggggacacagaaccaaaccatatcgaactgcataagctaacttcatttaaaaaggaaaaaagccttaccgtcttcttgaaggatgcacacaggtgtttaaataaatgcagtgtatatacttgggctttgaaggtttgagatacaaggctgggatctgctgaaccacattctggatagagctgcattctttaaatatgcaaccccgatgactgattttcttttaagtgaaacatgagacaagtcatattaggtgatgtgtctaaagagtcaacatatttcctcaagccatgaaatacttatcactgagtctctatgtaccatttgtattctgtacagttcttactgagacaatgtgctaatgaaacgtacattctattggaggaagcaaatacagaacaaaatagcaattaacaatgtttatcccctattggctctcatgggctccatatacaaatctgtgatgtccagacaactccttatctctgatgactcctaactttccaccagattactgttttttgaagcattttatattttattgatttaaaaattaaactgttcctttgctttttaaaaaatttatcatgtacatttgaggtttatgacataatggctccctagctttttatttagaacaatttcaaacttatggcaaaactgcaattaattcaacagtttgccacatttgctttatagctatttatttatgtacttttacattcatgtgttgttaaatggattgcatatatttagattaacatgtatatctgtatgttaacatatttttatatactgtatatgtttatattttatgtgcatatttaatcatattcatgcgtgtatatagtttgtggatttttttttcactgatccactcaatggttaggtttcatacataacacttcacccctaaacacttgaacacgtgccttctaaaatgaaagatattcttgcataagcacaattatcatgctcaaaaagaacaatactgttatataatgtagaatttaaattcaaatacctccaattctgccaattaatattcttcatagcgatattttacattcaggatcagtgatgtccctgtagtctcctttaatctgaagcactttcccagcctctttaaatctttcatgacattgatatattagaagaggtcgggctagatgttttgtagaatgtcccccaatttgaatttgtctgcttgtatccaagtgattgggttcgggttaaatgttttatgccagattaccatataggtaaggtatcctcagtacatcacatcaaggttttcctcaagattctccatccccttcaccgttcttcactctccctgggcgctccttccatactttggcttctgctatgctgacaactcttaagtcaagatttccagcccagacctcccacctgagcatcttctggataaaattataaataaaaatatagcctaatctgaaatcatgatcaacctttggagcatctcttccaatttcccaatctatacaaagtcattttctaccccttcttcctttacctgccttccttagctatgttccaccaccatcaatccagtcaccaaggtcagtgtgttttgctacttatgaaaaagagcaaaattcttcaattcagctacttctgcccaaatttagccctcatcatgtgttacctgaacagacaatatgaatactttcctaattggttcctctgcctttggtctctctccctttctaagctatcttccagaaacttcagttcctcttctaccattcaaattatatcatattattcccctctttaagcattttatgccttctgtttgacaacagaataaatgtgctctttggccttgagtacattatgttcttaacctgaaatatagcatcctttcttttcactcagtgagttttcttttggaacttaatcatgcattatatcattctggttttgttgttgttgttgttgttgttgttgttgttgtttcttttgtgtgagacggagtctcgctttattgcccaggctggagtgcagtggtgcgatctcagctcattgcaacctccacctcctgggttcaagcgattctcctgcctcaccctcctgagtagctgggattacaggctcgccaccatgcctggctactttttcttgtatttttagtagagacagggtttcaccatgttggccaggctgttcttgaactcccaacctcaagcaatccacccgcctcagcctcccaaagtgctgggattaaaggcatgagccaccacacccagccatgttttcagccagttactagtacttctttcttctgcctacaactccctagaacttaagctccttaaggacaggatgtaagtcttgctcattgtcgttactgtatgaggatactctgtgcaacaaacaatcagtaaagtgcttgttgagttaatattttagaaatcaagcataatacattcttgtgtacacatggaacagcccacacgtttaggaaatttagctactagtttcagtatctttcaccaccattcacaactgatcagctaataatcagcaacaacattgtacaccataatatgttaaaggtgttacacacagaatttatgtgtgaaattgaaagcatcggtcctatatcatatggaaaaaaattaattgtagccaaatgttgggtattggatacatcagtgtgctttttcttctaaaaaatactggagaaaggcaggaaatacacaagtactaagataataacacatcaagtcggaaactggttaaaatccaaagaaaaatgttggtgggcgtatttgttcatacacagccccctttatgagaaaaaataatttcttgtacacagctcctttttaaaaaaaagagaaaataatttgtttagattcagacaaaaacacaggagtaattcttgtgtctattctgcataggctgcgtaggttctggctaaaatcactttttaagcagatagaaccattatcagcgtttgaatcaaagggaagtgagtcagatgggatatcttcccttcaagaaagggatctgaaaccatcgttatatttcagaagactgaagaatatcttgccatggcaaagcattccttttcttttttctcggattaaattgagtcatcccacttcttttttcttcacttcagcagtgattaaaggagactatcatattttgctatatcacggtactatttaactttgactatgtctttccttattttaaaaaatgtttcagtgatttatttggaccacaatcagacaagccaggaagaccaaatagctaataatccaaaaaacattatttttctctttttattatttcagtagttttcagggaacccaggtggtgtttggttacatgaataagttcttcggtggtgatttctgacatttgggtgcatccatcacctgagcagtgtacactgtacccaacgtgtagtcttttatccttcacccccctcccacccttccccccaagtccccagagtccatggtatcattctcatgcctttgcatccgcatagcttagctcccacttataagtgagaaagtacaatgtttggttgtctattcctgagttactttacttagagtaatggtctccaactccatccaggttgctgtgaatgccattatttcattcctttcatgactaatattccatggcgtgtgtgtgtgtgtgtgtgtgtgtgtgtgtgtgtatataaacaccacgtacatactgcattttctttatccactcgttggttgatgggcatttaagctagttccgtatttctgcaattatgaattgcgctgctataatcttggtatgcaagtatatttttcacataatgacttcctttcctttgggtagatatccagtagtgggactgctggatcaaatggtagttctacattttagttctttaaggagcctccatagtgttttccatagtggttgtcctagtttacattcccaccagcagtgtaaaagtgttctgttttcaccacatccacactgacatctattatttatgcatgtttgtggaaatcaccttggagtagagtcaagtttaagtgttaaagcattgccatcaactaagtttaaaatcccccaaagactagcaatatgctatttgagcaggcaatgaatctgtgaagtagggataagggctgtgcaggtctctagtgtgcaactggaactcagtattttcttgttgaataagtgaaaaaagtgaaaaggtgtttttgtttttggtgatgaggggcttgtgatgacaggtattattgttagagtcagaaatattttgaggttgcctattaatatggtttggctctgtgttcccacctaaatctcatctcaaattgtaatccccacgtgtcaggggagggacctgatgggaggtgactggatcatgaagaagttttcccccatgctgttctcgtgatagtgagtgagttctcaggagagctgatggtttttaaagtgtgtggcacttcccccttctctctctctctctctctctctctctctctctctctctctctctctctctctctctctctctcctgctgccatgtaagaggtgccttgcttcccctttgccttccaccatgattctaaacttataatcatgaggcctcctgaggcctcctcacgcatctggaactgtgagtcaattaaacctctttcctttataaattacccagtctcaggtagtatctctatagcagtgtgaaaatggattaatacacctattatgttgtagctacatagtgtatgattagacaagccataaatattatatctggcttgtttcatgcccataatagtgtatcagtcagctgttgctgcataacaaataaccacaaaattctcaagttgcatatttctcattcacgcatctgttgtttggctgaacttttgctggcaatcagctggacttgacaccaagttgtggtttgggttcaggtctgttcaacatgtctctcatccttcttgggctagcaagctacctgggccatatgcttcttgtgcacataaacacaagcgggcaaccccaaccagtcaaagacattctaagcctctacttttgtcatgcccgcttacattccattttccaaagcaggttatgtggccaaatccgaatccccaggccagggaagtactgttttcccagctcttgttcactctgctttatctacattagacttcttgctgtgcttgaggaagccagtcacactctcctctcagagtctttgcatttgccaatccttctgtctggagcacttttccctcaaatacttgtgcaactcataccctccagttcttaaagcttttgctcaactgcatctcatcaatgaggacttccaagactccactttctgatgactctcattgtcccttgctagccctctcctcagagtgttcatcaccactcaagatacctatatagtttacttatttacttgttaagcctgtgtgcctccttatgaatgcgagtttcacagagagagtgtgtgggtggggtttgtttgcttattgctatatcttcagtgaacaatatgccaggcactgttcaaccatttgaacagtgcctggcatatatagttggattttaataaatatttgaataaataaatgaatcttactgtttttaaacttttgtggtttttaaaaggcattttaaaaatctgggttagtatcaaatattacaatggtattactttaacttcaggtttcatttagctgttttaacttttacaatatattctgacacagaaaatattaggcattaagcatttttcaatgagttgattcacttctactcatgcacatatgtgatgtctgatttcgattcttaaaaagagatgagcctgggcgtggtggctcacgcctgtaatcccagcactttgggaggccgaggcaggtggatcacgaggtcaggagattgagactattctggctaacacggtgaaaccctgtctctactaaaaaatataaaaaattagccaggcgtggtggcacgcgcctgtagtcccagctactcaggaggctgaggcaggagaatcacttgaacccggaaggcagaggttgcagctagccgagattccaccactgcactccagcctgggtgacagagcaagactccatctcaaaaaaaaagaaaaagagaaaaaaagcaatgcattaaaaccatcttgagaaatcatgaaaatatggagaaaagaagaaaacaagattatactctacttgtttttatactacctagaatgtaataggcactcaaaaaaatgtctgaatggatacaattatcactgccttaaaagttttccattaaagcaaagaagccaattttacatttgtattatacttggacactcatattaaagactcacagagagtttatctggaaaaataaacttggctgacatcattaggtttatactttataatttgatctttgaaataattcaggaacaggaatgccagtcacttcattgaactgtacctgaattttaacacagtacaattgagttcctagagctccaatatgatgtaattaaactgtcagaaatattaacatcgatgttcatgagcgtcgttcatgatgttctcttggttctgatttattcagtgaggcatactgtcactgaagtggacttactgccattaaaaatgcctcatgtttcccagttccgcaaaaatttgcatcagtaatgaaacagagagatgtaatcagccctgcagttgtcaggatcttgatcctcttggtagtatttcattcatttcatcttcaccagataatggtagtttaaaaccgcaagaaaaatgaaactaaaaatagtgaatttcacttctttttctaaaggcataaacttaagcaaatagtgcatgtgtgtgaggggggaggaagagagagagaaagaggagagagagagtttgtaactattccttttctgctttgtgaccttaattcttcagcacccatttcctgtacttaatattgcaaagaggtttcctgtggtatgttaccaggagactcatgtagtctgaggctttttatctaccttacgttcttatccctccattctaataaaaatatgaagcctcacatccacctagaatatgattttgtcttaatggttagcattggcaatgattcttttagcttctgctgttaaaaaaaaaaaaaggaataaatgcaggattctaatcaaacatgaaaatccaagtggcatagaccaaagggaatgagaagcatatttaagtcatttagtcactggcttccgaagcagttccaagtcagatgtaaacctgaggttgtccctaattaagttcattatggttgacttgctaaagcaaggtcttgttttagatggaagtgacaatgtgcaaaacaaacagagcttgaatagaagttattttcactattggaagattgtatattatgaaaagttagtttcaaaggacctttaaagtttaattttgtttgcacctaagaaatttccctttaacttgcaaatgctgtttgaagtgtatttctttaacacatgaacaaacaatacagacacagattcacaaaatctacaaggagatttccattcccagtgaatatcatccatccataggtttctttgcttccagatcatcattctctcctcacataaacagtcaaaatgtttgtaatgtcttctttataaaacccaaaacataattatgataaagtagtcccaagtaacagaggaaaggaccataactctccaatatatgccatatctacagtttttagaatattcatatttcattacctatataggatatatactatttttatttctattacattggagtttaaaggtacttgagtttcgtttgtatttttggttaaatgtcaaaacaaagagtgaaaaaaagacctcagtgtctcaactcccttcttaccttcatgaagtgactgcaaagtgttcaattcttactcttttgtgttgaggagacagcactgcaagtgtgcagtaatacttattttattacatagaacaaagtttcacatttgtgaatggggcacaaaagagagcttgtcagttttacctttttcaattgactttttcttttattctttttaacttttaaatttattttttgtttttttgtttttttgtttttaaatagagacagggtctcactatgttgcccaagctgctctcaaattcctggcagcaaacaatcctcccacctcggcttcccaaagggctgggattacaggcatgagcgaccgcacccagcctgttttttactgtagtataatatttgtacatatttatggagtgcatttgatattttgttgcatacacagaatgtgttaatgatcaagtcagggtatttagagtattcattatctcatgtatttatcatttctatgtgcggggcacatttcaagtaactagtcaacttttaaaaagatacgcagtaggctgggcgtgttggctcacgcctgtaatcccagcactttgggaggctgaggtgggcagatcatgaggtcaggagttcgagaccagcctggccaatatggtgaaaccctgtctctactaaaaatacaaaaattagctggacgtgttggcgcatgcctgtagtcccagctactcgggaggctgaggcagaagaatcgtttgaacctgggaggcggaggttgcagtgagccaagatcgtgccactgcactccagcctgggtgacagagcaagactccatctcaaaaaaaaaaaaaaaaaaagatatacagtttttttttctccaagggtaatgatatagataaactactgtatggatttcttcttccctttaaagaattacttcctcattattaagcttgagggttttctttgttatttatgagcaagtgaaatgaatttataatggtgttaaaaatgtaatcatggccctttaatatctgttttctataaatgtaattttccattatttgtttttgcttttattaaggtgaggaagatcttctcagtcctccccaggacacaagcacagggttagaggaggtgatggagcaactcaacaactccttccctagttcaagaggtaagctccaatacctagaagggactcagatttgctgggatcaggccactcgcttccctacccaactggtgtgtgtattttccatatggaagccaacacgcagtatcagaatggcaatttgggtccatggtgaaaagatttgatttttaagtgtgaatttgtggtttagagtactctgaattcaaatacccgtgagggcaacatgtttccaaaaataagaataccaccctctatttgtcaagtattttacttgcttcacacattagtctgaagagttaattatgaggtgccctttactgaagagcaattattatgtgacttttacagatgaggaaattaatgccctgatagtgcctttgccagggacatatggctactacgtgctacagcaaggcctagaacaatgcctactgattggtagtggtagagattctgacttgccatctgatgccctttatatttaaaaattgtatcttactccatcatttaaatatagggacaattaaatcttcatagagtagttggttattttttacttcgatagaggaaatacaggcttagcaaagaaagacattaatatttttctttttcttcatcactttggccttgcgtattttacccccatacaaaaacagcattttaccctgcagaattttcccactggcttgcatgagcttcagatgtcttgcttcatccaagatgatgttttgctgctactgttcgtttctgggggcatttatttggtttattgccctcacataaaacaaagtcactctctcgccttccttcaacgaataaaaaggatggtggcagtcacctgtgatcaaatagaagaaaagcctagagaaacaaaagggagaaaacacaaggctttgtggccagtgattggcacctctaatgggtagcctgggagggacgggcagcaggaaatctgggctgtttgttcctctccataagggcaatgaggagggtgtattgagtagtgtgtttttcctatctttttgttcagtgtcagttaacaatggccatttcctagctatttgatgtgcaagtaaacgttgtgcagtgcacattaaaagcaataatgttctggtagagcgttgctaaggaaccgtcaggggaagctaattttaaatgtctgcaccagccatcttttcactgctgagcgccactgaagtgatgattttaacagataaaaatcttatctgtcttccacccacctccacatcccccaccgccacccgcatccccattctgactatcttaggtatctccttcttctagatgtcataattcataatgagaagatcatacacaggcttgacagaatcaggtgctttcacgtgtctcctcattactttgtcctgcttgcttttactagcacctactacgtaccagtggaggtagtagggatggaaagaagaaatgacaaattccttgccttcaaggtacttatggtcaattgcagatacagaactccaaagaaattcaaatcacagtacaatcattgattactgtatgatcctggccccttgaactggcagcttgcttacctgctctggaaagttgctggctgccctgttggcaccctgggcatttcttccacatctaaacaagaggttagtagagaagaagctacagcaaggctcatgactctgcttcttcataggcagccttgacttcctagactcctttttgtacctgagtttctggtccaccctaattagctgtaaggtgaaatcctttgcaccatctccctgtgtcccgcttttagagtccttaaagctagataccacatgggtgtagaagcttcctggaagacaagaaatatacctcctctgatatggtatttagcagtcagtatctctgatgttgatttacttacttgtatggaaacttgggaaactcaattcaggccacctggatagtgtttactaaattagtgcttacggaagaatttcaggccttaagggctgatttaagttctcaaatgtgggagaaggaagccttgtccgataccaattccattaacttaagttccggcttactcagtggtacccttgtggcctgagaaaataaattcacattcttaaaaaacaaaacaattaaatacacaaaaaacacaagagagtagctaaggtattggaaaatctggcctatcattctgtaataccatgatcttggcatttcctcacgttttgctactttcagctaactcaggctttcttacaggcctttttctccccaaattcaagtggataaaaagtttcattattgtaaaaattaggctaattattgatgcactcaaaaaagtggtttttggatgctttctttccaactaaaagcacttttgttttttaattttgaaaaatggcatatgtgtgtgtacacacacatataccgtcaagtttggcgggaacatcttaccagttggtagatgtgttcagctgatattaagcagaaattcttgagaatcttaacatcttgggattacaaagtctttcaaatggaagagccttgaaaggtcattttaacacttttgacatccaggacagtgatttctgactctgttttgatggttatccatatcagaggaacattttacatcacaaactggggtaaagatataaaataaattgtacatgtgtttatgtacacacatgtatatatacacccaccatatgtacacacacacatttacagtgtcatatgcatacaaagatcagaaacaaaagtttcatcaagtgatgccttccatactacatacagtgcatgctgtttttctattttatttatttaaaaacaaaatgctggttgcaacccactaaatggattttctgaaccagtggtttaaaaatactaatctatgtgatctcagtttttcttgcctggttgaattatctttcaaaaaaatttaaattttgagatttttgccgtggaagtttctgccaagacgttgctaatgtctcagagacctttatagttttattctaacactaccatccatgttctcattgttgtgttacaaaaaacaaagttcatgattgctacagctgttttggacagctgtttgagtaactcaaaacagatgtgagagccagaggtctgacatttagtggaaatgtgctattaaataccaccgcgtggtttacttaaccctgctagataattgcccacagaggaaaagccgtttttaaaaaacttatgctcttcataaacataaagtatatagataggtaagctattatgtacctcaaatttacaacttttctgttgccccttgccacagagttggtcctgaaggtgtcagctaacctttctttatcttttattttcacaaagagtacctggaagccaagaaaagtcaagtgccttatttatggccattcagcaggttaagttaggcttctaatcttatcttaatggctttgctaaactgttatcaaaattaataaatgagtggcatgcttctccatttagtgataaaccgatggccaacactatcctgcataataggcaatataagcaggagcatattcaagatatgaatgtgtaaacattcagctttgtgattatatctttctggttggtctctagatatacttagttgttcacaaacacttgggagatttgagtggctcagtgtatatttgaacactgaatattagccaatttctatctaatctgtctatctctaatctcttcctttgtaagtatatgtgtagaaattgaattatagtgtaataagtcattatctactttactataaggtactctctaaagctctgccattctataggaaaactacatgggtacaataaacaaacgtaatttaaaaaataaccccattaagtgatttgtccataagtctctgatcatttagcagactaacaaagatatttttatatgtatgtgcattgatgaaagaaacgctctcctagtcagtagtatggtattaggctctctaaaatgtggtaccactttatatagatgaatgaataataggagccaagataagctcttaatgcagtaaaacaatccagaaagcagttagcagtgctactatttctgctacctgtacaatctcttgcctactgacctgtgccacattatctccaccagcccatgccatcctctttttttcataccatcccctctcaaataagcccgcgtacattctatcaaatacccctaaattaccaacccaacagctttgtaaaacctaccgtcttttaaaattaaaatcttattctgtggttcttttatggaagagcaacataaagaacaaaggcagatagaaatatggtgtgccctttttcaggcaccattctgtttcctgtatgctcccacaaaggatttgagcggttatccctttaatccaggactagcaaactacatacagcccaaatgccaaatctggcccaatacctgtttttataaagctttattggaacacagccatacccattcatttacatgttgcctatagttgctttctcattaccagggcagagtagttgcagcagtgctgaatagctggtccagagaccgtgggcttgcaaagcctgaaatatttactatctggccctttatggggaaaatttgccaatccctgctttacgctattatttcgttgtccattctgactcattacatgtatagagtcacaggcttctgtgctgatcaactttcagctgaacaagattattgagctgaaattgaattgatttatagatttatattcatattcaccaaagagcctgcaagtgtggccatttgaatttttttgacttataaaataacagaaatcctaaaaagggacttattcttccttaagtattttaaatagtcagtgaattaatataaaagaggctaaaagcacccagaaacagtactgtcctgcaattccaactctaaaataatgaattacaatcaataatgtcaattttatagtgcccgaggaaattagacttctcgggacctgaccaagccctttatttagactcaggactgccccagcacacttcccttttgtcttgattcatttcctgacaacacatcacattgccagatggacactgtaactgaaggtctacagaaactcatttccaaaaaaaaataaatgtttagaaaatgaaacatatctgaaactttatttatcggtcaagaacttttaaaaatgttgtaatcaagtagcctctgttttgtcagcgtagaactagtccttttacagtagaaaatatcatttgtttttaactttttctaaagtgaaaaaaaggaccttccttttgtaatgtgttaatgagtacgtggggacccaagtgatgagggaggattttagaagagattagagttagcttggctctgggaggtccattttcataaaatatggtttctgaagaaggatctggaacataacacaagtcatttgctgctacatattaagaaataatcaattgataactgagttctgaatatggcttagtgtagaattactaaagatatgtatcattaagcattcaaagaatcatcgttacattctgaagtacataaccataattacattctaaatcacatggctttctaacaacactgtccttcctaaagatctcaagttttcaaaactagaccaaagttacatgccgaaacaagttacccacctttggcatccaaactaaagtgtgccagtgaagggcaagttacttataacacagaaggactcctcttggtcatgacccaactactactttaccaattcacttcagccagtatttatcaaataccaaaagtgtgtatatacggtacagggcattgggcatagagaggtggatgagcaacatgtggaccccgtcctcaagaggcttatagtcttacaggggaagggaattaattctgccaccagacagtattatgaaacataaagatacttttttaaaaaaaccttgctaaaggaatcaaaaagaaggggtgagtgattcatactgggatttcagccatcaaggaaagaatgatgttctcctccccaaatgatgggaacatcatttggtatggatctcccactagtgacacccacagctgaggagctagtacccatttttctccctcttttccctggcttgaggagcatcttaaatacctggcccttacgtggtcaagctgaaaatctgatactcctaagaaatcgctgagtcatgtaggaaattcagaaggaagagaggaagggagagaaggagaaagggagggaagaaagagaaggagagagggaagaaaaacttagaaactatccttaaatgtatactagaagttttgaaccctaaccttgagtgagttttgaaaggtttctattggtgtcgtagctccatacctcttcattccagactagtagttctcaaattgtttcagggagtttttagtcttcttggagccactgagaatgatgggtggaggggaaagggagatgctgtacaggatctctcacagctctgctttgaactgctcaaaatattggaattccatataagattgttttaggagatgtcccattgctatagttaaaacagtttgaaaaccaagattttaaaggaaattgcatgcccaagacaggctattgacatgtatggacagaagtccctacttttctgtccaattatgacttatcatagaacactttctcatcagagtctacttttgaaatacaaataaatgcatacagatgtaggaatctatgaatcaaggccagtgggtctttagccattgcctcgtaaggctcctgatatttgctgaattggggaggaagtggaaagctcattcctggatctggctctgtggcttgcccattactgggacttacctcttcccctcatctgttctttctgttttctcaaatgcctccaatttcatcatggaaatgctcagcttctatcagatagaacaaattctcccaagaggatggagtccagcctctatgtcgggttctaccttgcatttgatgtgcagactttgggcacacagagtcaactactgtttatgtttcaatgtgctgattgtcaagagtgaagagattctgagactttttttaacattaagtttgagttgtccttgaaaacaatgcccaatttgtcagatttctattctgtgccagttttcatccagtttaatgcgtgaactctatggattttacaaatgacgtcttctggatcatgttatctgtttacactgatcttaagtgtatgtaaaggttatttgactagatgtgtcttttgggttttttgtttctgtttttttttttttttttttttccagcagagaataaatggtcatctcaacatttgtttggtaaaagaagcaaattggtatgaaattgtatatttatgcatgttttttttccctttctgatatctctgcctcttcctctctctattattaaaggaagaaatacccctggaaagccaatgagagaggttagtgagattcaggctcacggccatggcttctgtctgtctcatcctgctttttatgtttggcgtttgtgtaagaattgtgtgtgtgcacgcgcatgtgtgtattacacattgtgtcatcatgtaaggatggtagtcacctctccacttgcagctcatgaggaacattcctcaaatgttcattgccgttgtcatcaccatgacgacaagactggggttgggagcaagaatctctttaaaatggcaatcctttgtagtccctaggttggaatcctgccgttcatcatctgttgccatttgcaacactaacaaaatcttcaaaataaatttagccttgaacataactgatgagtcataaagctttcttccacttccaggaccttagcattttctgccagcgcccttagtttttattcttctgggatgacttcattttgcttttgtttccttttttcttggttcctacgctctttctctcccattttagcgaacattttttgagcacttactgtgtgccaagcattgttctcagcacttgccatctttttcatcatgtcatcttcatgacaaacctgtgaggtaggtactcttattaaccccgttttacagataaggagactgagtcaatgagagagtaagcagtgtgtcccaggtgacagagccaaggatttggatccaggcagtctggctccagacccacactcttaactctcatttgaaaggcttacatcatctcaacgtacccttcagaagatgatcttttttatttggtatttgaagccacacagaacaataaccaattcgattaaaaaattaaatattggagttttgagaggtttttaaaatgcctatttatgggttgaaagggatagggtgcagtcttatcactgaatgtggtttcaggttttacggtgaaagatgcttcttactcctattccaccaggaatattgtctgaatatcgaattacctaattaagtgactgttggatgacaaagtgttaactgacagcccaagtaaaatcaaggttgtctttaccaagaatttaatctgaaggaggagagaaggaaagctctcccatgggatgacagtgttctgggagacaggctggatgggtggagagtccttcttaaatgagaagattctggattccttagcaacaggatggactggagagaccactgattcatttaaacacaggagtcgtaatgaaaactctgccaacatcatgccatacaagtctaatcaatttaatgattcttcagtgtgtctgtgccagtgcctccttccaaggctttgggcagtggggccagggagggaatggtaggctgggaggagaaattgaggaaacctgacttggtgaagcattgaatgcccctgacggtttgcctggttcatgtacttcgtatgtgagacttcttgggttcattcttatggtaagtgccccttaaaatttattcattttaactttttgtagaaaaatgcaccataattttgaccaccttaaacatgtttcactcacaaatgaatttcagaaaaggctagcacatgtaattgaagttatataggcatttgcagacttgactacctgaggtgtatggtgttcagacaagtttccagaagccaaagaatcaaaacaataatgaccttttttaatgctatgaaaatatcccaaatgtacgtaaagcagatttttttcagagattaaattatagagaagaaaagataagcaaatttccctgtagtattccggctttcctttggacaactgaatgctaacaatttatttgggaattgtatttttaaaaaatagagcaccagattgctattgaggtcttggatctttgccagaaagtctcaattccaatcgctgtggaaaacaattccctcaggcagtggtgacgtgtgagactaaatgtgttgcagttagcgccaacttgaaaaacatacaactgccctaatgttcaaggcatagtgcctttgtgttcaataatccttaagaatggattaaatcaatactttctatagacatagttttctgtcaccttgtgcctgaaggtgattgcaaatgcctgaatcctggctgcttttcagtacctctcatacttcatagtatgagattgtaattttgactttagaaaaatctgtcaggtaacattaatgacctcccgaatgctctgccttacacacatggataatagaactaggatacaaatctactttctatagtcatgtcacagtgcagtcttacccctccaacggattaaagtatgattctttagggcagtagtttgtaaaaagagattgacttcttttttctggatctaatgaaaaactccatggaaagaaattagaattatttattctggtaaagcaggtatttagtgaagtaaccaaaggcataatatagatgatgaggtgactctaaaagttctttatttttatagcacaaagatggccacaaggtcatttgtgaaaatgcagcagtgtaaaccggttaaaggccacccaactttttgtcggagtgtgcatggcacattaagaataatgaacctgttttccctggcaaatctttaaatagcagatacccctagaacttatgcttcttgagagactcaagaattttccttccagttagtaactgaacaccatttcaaggaagagaagcaccacttggctatataatccataaatgcatttatttgttttattatattttgaactgccatctacatcccctagcacacagcctaaaaagaaagacactttgtgattatcgataagctgacaggaaaaaaaatgagttttctccccttttcgttgatgttttgtaatatgttttctagctactaggtggactacatactatagtcacatgtgggccatgagaaatacttcgaattacattcaggcaccatgttgtaaaggtcctggactttgtttttactgattttgttaaccgtaaagatcgctagtaattaaaaattggcagttagtccatctatcttcaatttatgcatgaataattatgcagatttcccagggttgctggacagccaaaaatagatacaggggaagccctccaacttgatagcagcagttatatatttgtactctgagctctaaggagcagcaaaggccccactgtgtcgtcttcctgtggtttttatggcacagaaagccaaaaatgatttcagttcttcactgagggctgccaaactattggcccactttatgaatagttgcatatgctttgttaaaaaatttttatacttgcagtctcagccaaaatccaaagtgattttctaaaatataattaatactccatgaaattctttgcactaataaagcacaaaaagatagatatacaaacttggtcaccttaatagaaatgcctgaatgacattaaacttttaataagtaagtcttcagttgatctggtgccatcactgtttaagtgcctgcccgtgaatccgcttcattttgtagagaagctatatctcttgaaataaatattaaaacaaaatactctccctagtctatagctttaatttttattgggatatctttaatttttattggtatttttaacaattattatgggaatctgtaaagttgatacatggcaaggtagtaatagcctagtaaagcatttcagttccaaagacaatacttgaatagtggaaggatttaccaatgtgcaataattaaaattagccatgtaaaactatgggacatagacgaaaaggcaagccataaagtaagtctcagattatcttactctaaatctgaattttgctacgaagtacccagggacattgtgctgttctttttctccgtgctgggagattcgtgctaggtcgtgctgcattattagtaaaaggctattgtgatagttaaccctcatttaggaggagctctaagatggattcacaaaatacccaaatgcatacaatacatgtgggtcaccttataattagggtctagagtaatttggaatgtaaagcaatttttattctgaggtttcctaattcaaatgttaatagtgcaccaaaaggtcaattcaagagtttattattattatttttcaacccaagtaaaagcagagagaaaatagccacctccaccatagcctcagaagcaagccaacagcctgaaacagctttgaaatgaaaagttggtgtggcggtgatggtggcagtgataatggtgacgatggttgggtgctggtgatggtagtggtagttgtgaaggtggtgatggtggtttgattgatagtaaaaaaaatgttcgttaatacaagtagagagtaagtaatcaatcaatcactcatagccaaggtggaaaagatgtatcccatcatggaatattcctgttctgatagaaatcttgtgcttatctatggaattcttttgatatatatttacattgggaacctgaatgtagcttgacatttttccatgtaaacaccagtagcctgatccaacattaagctgatactaacaaacaacgtgtaatggcttcattaataaggctttgcttcttcctggaaactggtgaaaaatcaaaccttgttgtgtacaccctcgatgcagcttctgtgttgtcttcacccagaaatggggaatgatttcccaaatggcaaagaaacagagtgatgctatctatctgcaccttttgtaaagtctgtctttctttctctttgttttccaggacacaatgtaggaagtcttttccacatggcagatgatttgggcagagcgatggagtccttagtatcagtcatgacagatgaagaaggagcagaataaatgttttacaactcctgattcccgcatggtttttataatattcatacaacaaagaggattagacagtaagagtttacaagaaataaatctatatttttgtgaagggtagtggtattatactgtagatttcagtagtttctaagtctgttattgttttgttaacaatggcaggttttacacgtctatgcaattgtacaaaaaagttataagaaaactacatgtaaaatcttgatagctaaataacttgccatttctttatatggaacgcattttgggttgtttaaaaatttataacagttataaagaaagattgtaaactaaagtgtgctttataaaaaaaagttgtttataaaaacccctaaaaacaaaacaaacacacacacacacacatacacacacacacacaaaactttgaggcagcgcattgttttgcatccttttggcgtgatatccatatgaaattcatggctttttctttttttgcatattaaagataagacttcctctaccaccacaccaaatgactactacacactgctcatttgagaactgtcagctgagtggggcaggcttgagttttcatttcatatatctatatgtctataagtatataaatactatagttatatagataaagagatacgaatttctatagactgactttttccattttttaaatgttcatgtcacatcctaatagaaagaaattacttctagtcagtcatccaggcttacctgcttggtctagaatggatttttcccggagccggaagccaggaggaaactacaccacactaaaacattgtctacagctccagatgtttctcattttaaacaactttccactgacaacgaaagtaaagtaaagtattggatttttttaaagggaacatgtgaatgaatacacaggacttattatatcagagtgagtaatcggttggttggttgattgattgattgattgatacattcagcttcctgctgctagcaatgccacgatttagatttaatgatgcttcagtggaaatcaatcagaaggtattctgaccttgtgaacatcagaaggtattttttaactcccaagcagtagcaggacgatgatagggctggagggctatggattcccagcccatccctgtgaaggagtaggccactctttaagtgaaggattggatgattgttcataatacataaagttctctgtaattacaactaaattattatgccctcttctcacagtcaaaaggaactgggtggtttggtttttgttgcttttttagatttattgtcccatgtgggatgagtttttaaatgccacaagacataatttaaaataaataaactttgggaaaaggtgtaaaacagtagccccatcacatttgtgatactgacaggtatcaacccagaagcccatgaactgtgtttccatcctttgcatttctctgcgagtagttccacacaggtttgtaagtaagtaagaaagaaggcaaattgattcaaatgttacaaaaaaacccttcttggtggattagacaggttaaatatataaacaaacaaacaaaaattgctcaaaaaagaggagaaaagctcaagaggaaaagctaaggactggtaggaaaaagctttactctttcatgccattttatttctttttgatttttaaatcattcattcaatagataccaccgtgtgacctataattttgcaaatctgttacctctgacatcaagtgtaattagcttttggagagtgggctgacatcaagtgtaattagcttttggagagtgggttttgtccattattaataattaattaattaacatcaaacacggcttctcatgctatttctacctcactttggttttggggtgttcctgataattgtgcacacctgagttcacagcttcaccacttgtccattgcgttattttctttttcctttataattctttctttttccttcataattttcaaaagaaaacccaaagctctaaggtaacaaattaccaaattacatgaagatttggtttttgtcttgcatttttttcctttatgtgacgctggaccttttctttacccaaggatttttaaaactcagatttaaaacaaggggttactttacatcctactaagaagtttaagtaagtaagtttcattctaaaatcagaggtaaatagagtgcataaataattttgttttaatctttttgtttttcttttagacacattagctctggagtgagtctgtcataatatttgaacaaaaattgagagctttattgctgcattttaagcataattaatttggacattatttcgtgttgtgttctttataaccaccaagtattaaactgtaaatcataatgtaactgaagcataaacatcacatggcatgttttgtcattgttttcaggtactgagttcttacttgagtatcataatatattgtgttttaacaccaacactgtaacatttacgaattatttttttaaacttcagttttactgcattttcacaacatatcagacttcaccaaatatatgccttactattgtattatagtactgctttactgtgtatctcaataaagcacgcagttatgttac

SEQ ID NO: 32 - DNA, 13992 bp, Homo sapiens
atcagttactgtgttgactcactcagtgttgggatcactcactttccccctacaggactcagatctgggaggcaattaccttcggagaaaaacgaataggaaaaactgaagtgttactttttttaaagctgctgaagtttgttggtttctcattgtttttaagcctactggagcaataaagtttgaagaacttttaccaggttttttttatcgctgccttgatatacacttttcaaaatgctttggtgggaagaagtagaggactgttatgaaagagaagatgttcaaaagaaaacattcacaaaatgggtaaatgcacaattttctaagtttgggaagcagcatattgagaacctcttcagtgacctacaggatgggaggcgcctcctagacctcctcgaaggcctgacagggcaaaaactgccaaaagaaaaaggatccacaagagttcatgccctgaacaatgtcaacaaggcactgcgggttttgcagaacaataatgttgatttagtgaatattggaagtactgacatcgtagatggaaatcataaactgactcttggtttgatttggaatataatcctccactggcaggtcaaaaatgtaatgaaaaatatcatggctggattgcaacaaaccaacagtgaaaagattctcctgagctgggtccgacaatcaactcgtaattatccacaggttaatgtaatcaacttcaccaccagctggtctgatggcctggctttgaatgctctcatccatagtcataggccagacctatttgactggaatagtgtggtttgccagcagtcagccacacaacgactggaacatgcattcaacatcgccagatatcaattaggcatagagaaactactcgatcctgaagatgttgataccacctatccagataagaagtccatcttaatgtacatcacatcactcttccaagttttgcctcaacaagtgagcattgaagccatccaggaagtggaaatgttgccaaggccacctaaagtgactaaagaagaacattttcagttacatcatcaaatgcactattctcaacagatcacggtcagtctagcacagggatatgagagaacttcttcccctaagcctcgattcaagagctatgcctacacacaggctgcttatgtcaccacctctgaccctacacggagcccatttccttcacagcatttggaagctcctgaagacaagtcatttggcagttcattgatggagagtgaagtaaacctggaccgttatcaaacagctttagaagaagtattatcgtggcttctttctgctgaggacacattgcaagcacaaggagagatttctaatgatgtggaagtggtgaaagaccagtttcatactcatgaggggtacatgatggatttgacagcccatcagggccgggttggtaatattctacaattgggaagtaagctgattggaacaggaaaattatcagaagatgaagaaactgaagtacaagagcagatgaatctcctaaattcaagatgggaatgcctcagggtagctagcatggaaaaacaaagcaatttacatagagttttaatggatctccagaatcagaaactgaaagagttgaatgactggctaacaaaaacagaagaaagaacaaggaaaatggaggaagagcctcttggacctgatcttgaagacctaaaacgccaagtacaacaacataaggtgcttcaagaagatctagaacaagaacaagtcagggtcaattctctcactcacatggtggtggtagttgatgaatctagtggagatcacgcaactgctgctttggaagaacaacttaaggtattgggagatcgatgggcaaacatctgtagatggacagaagaccgctgggttcttttacaagacatccttctcaaatggcaacgtcttactgaagaacagtgcctttttagtgcatggctttcagaaaaagaagatgcagtgaacaagattcacacaactggctttaaagatcaaaatgaaatgttatcaagtcttcaaaaactggccgttttaaaagcggatctagaaaagaaaaagcaatccatgggcaaactgtattcactcaaacaagatcttctttcaacactgaagaataagtcagtgacccagaagacggaagcatggctggataactttgcccggtgttgggataatttagtccaaaaacttgaaaagagtacagcacagatttcacaggctgtcaccaccactcagccatcactaacacagacaactgtaatggaaacagtaactacggtgaccacaagggaacagatcctggtaaagcatgctcaagaggaacttccaccaccacctccccaaaagaagaggcagattactgtggattctgaaattaggaaaaggttggatgttgatataactgaacttcacagctggattactcgctcagaagctgtgttgcagagtcctgaatttgcaatctttcggaaggaaggcaacttctcagacttaaaagaaaaagtcaatgccatagagcgagaaaaagctgagaagttcagaaaactgcaagatgccagcagatcagctcaggccctggtggaacagatggtgaatgagggtgttaatgcagatagcatcaaacaagcctcagaacaactgaacagccggtggatcgaattctgccagttgctaagtgagagacttaactggctggagtatcagaacaacatcatcgctttctataatcagctacaacaattggagcagatgacaactactgctgaaaactggttgaaaatccaacccaccaccccatcagagccaacagcaattaaaagtcagttaaaaatttgtaaggatgaagtcaaccggctatcagatcttcaacctcaaattgaacgattaaaaattcaaagcatagccctgaaagagaaaggacaaggacccatgttcctggatgcagactttgtggcctttacaaatcattttaagcaagtcttttctgatgtgcaggccagagagaaagagctacagacaatttttgacactttgccaccaatgcgctatcaggagaccatgagtgccatcaggacatgggtccagcagtcagaaaccaaactctccatacctcaacttagtgtcaccgactatgaaatcatggagcagagactcggggaattgcaggctttacaaagttctctgcaagagcaacaaagtggcctatactatctcagcaccactgtgaaagagatgtcgaagaaagcgccctctgaaattagccggaaatatcaatcagaatttgaagaaattgagggacgctggaagaagctctcctcccagctggttgagcattgtcaaaagctagaggagcaaatgaataaactccgaaaaattcagaatcacatacaaaccctgaagaaatggatggctgaagttgatgtttttctgaaggaggaatggcctgcccttggggattcagaaattctaaaaaagcagctgaaacagtgcagacttttagtcagtgatattcagacaattcagcccagtctaaacagtgtcaatgaaggtgggcagaagataaagaatgaagcagagccagagtttgcttcgagacttgagacagaactcaaagaacttaacactcagtgggatcacatgtgccaacaggtctatgccagaaaggaggccttgaagggaggtttggagaaaactgtaagcctccagaaagatctatcagagatgcacgaatggatgacacaagctgaagaagagtatcttgagagagattttgaatataaaactccagatgaattacagaaagcagttgaagagatgaagagagctaaagaagaggcccaacaaaaagaagcgaaagtgaaactccttactgagtctgtaaatagtgtcatagctcaagctccacctgtagcacaagaggccttaaaaaaggaacttgaaactctaaccaccaactaccagtggctctgcactaggctgaatgggaaatgcaagactttggaagaagtttgggcatgttggcatgagttattgtcatacttggagaaagcaaacaagtggctaaatgaagtagaatttaaacttaaaaccactgaaaacattcctggcggagctgaggaaatctctgaggtgctagattcacttgaaaatttgatgcgacattcagaggataacccaaatcagattcgcatattggcacagaccctaacagatggcggagtcatggatgagctaatcaatgaggaacttgagacatttaattctcgttggagggaactacatgaagaggctgtaaggaggcaaaagttgcttgaacagagcatccagtctgcccaggagactgaaaaatccttacacttaatccaggagtccctcacattcattgacaagcagttggcagcttatattgcagacaaggtggacgcagctcaaatgcctcaggaagcccagaaaatccaatctgatttgacaagtcatgagatcagtttagaagaaatgaagaaacataatcaggggaaggaggctgcccaaagagtcctgtctcagattgatgttgcacagaaaaaattacaagatgtctccatgaagtttcgattattccagaaaccagccaattttgagcagcgtctacaagaaagtaagatgattttagatgaagtgaagatgcacttgcctgcattggaaacaaagagtgtggaacaggaagtagtacagtcacagctaaatcattgtgtgaacttgtataaaagtctgagtgaagtgaagtctgaagtggaaatggtgataaagactggacgtcagattgtacagaaaaagcagacggaaaatcccaaagaacttgatgaaagagtaacagctttgaaattgcattataatgagctgggagcaaaggtaacagaaagaaagcaacagttggagaaatgcttgaaattgtcccgtaagatgcgaaaggaaatgaatgtcttgacagaatggctggcagctacagatatggaattgacaaagagatcagcagttgaaggaatgcctagtaatttggattctgaagttgcctggggaaaggctactcaaaaagagattgagaaacagaaggtgcacctgaagagtatcacagaggtaggagaggccttgaaaacagttttgggcaagaaggagacgttggtggaagataaactcagtcttctgaatagtaactggatagctgtcacctcccgagcagaagagtggttaaatcttttgttggaataccagaaacacatggaaacttttgaccagaatgtggaccacatcacaaagtggatcattcaggctgacacacttttggatgaatcagagaaaaagaaaccccagcaaaaagaagacgtgcttaagcgtttaaaggcagaactgaatgacatacgcccaaaggtggactctacacgtgaccaagcagcaaacttgatggcaaaccgcggtgaccactgcaggaaattagtagagccccaaatctcagagctcaaccatcgatttgcagccatttcacacagaattaagactggaaaggcctccattcctttgaaggaattggagcagtttaactcagatatacaaaaattgcttgaaccactggaggctgaaattcagcagggggtgaatctgaaagaggaagacttcaataaagatatgaatgaagacaatgagggtactgtaaaagaattgttgcaaagaggagacaacttacaacaaagaatcacagatgagagaaagcgagaggaaataaagataaaacagcagctgttacagacaaaacataatgctctcaaggatttgaggtctcaaagaagaaaaaaggctctagaaatttctcatcagtggtatcagtacaagaggcaggctgatgatctcctgaaatgcttggatgacattgaaaaaaaattagccagcctacctgagcccagagatgaaaggaaaataaaggaaattgatcgggaattgcagaagaagaaagaggagctgaatgcagtgcgtaggcaagctgagggcttgtctgaggatggggccgcaatggcagtggagccaactcagatccagctcagcaagcgctggcgggaaattgagagcaaatttgctcagtttcgaagactcaactttgcacaaattcacactgtccgtgaagaaacgatgatggtgatgactgaagacatgcctttggaaatttcttatgtgccttctacttatttgactgaaatcactcatgtctcacaagccctattagaagtggaacaacttctcaatgctcctgacctctgtgctaaggactttgaagatctctttaagcaagaggagtctctgaagaatataaaagatagtctacaacaaagctcaggtcggattgacattattcatagcaagaagacagcagcattgcaaagtgcaacgcctgtggaaagggtgaagctacaggaagctctctcccagcttgatttccaatgggaaaaagttaacaaaatgtacaaggaccgacaagggcgatttgacagatctgttgagaaatggcggcgttttcattatgatataaagatatttaatcagtggctaacagaagctgaacagtttctcagaaagacacaaattcctgagaattgggaacatgctaaatacaaatggtatcttaaggaactccaggatggcattgggcagcggcaaactgttgtcagaacattgaatgcaactggggaagaaataattcagcaatcctcaaaaacagatgccagtattctacaggaaaaattgggaagcctgaatctgcggtggcaggaggtctgcaaacagctgtcagacagaaaaaagaggctagaagaacaaaagaatatcttgtcagaatttcaaagagatttaaatgaatttgttttatggttggaggaagcagataacattgctagtatcccacttgaacctggaaaagagcagcaactaaaagaaaagcttgagcaagtcaagttactggtggaagagttgcccctgcgccagggaattctcaaacaattaaatgaaactggaggacccgtgcttgtaagtgctcccataagcccagaagagcaagataaacttgaaaataagctcaagcagacaaatctccagtggataaaggtttccagagctttacctgagaaacaaggagaaattgaagctcaaataaaagaccttgggcagcttgaaaaaaagcttgaagaccttgaagagcagttaaatcatctgctgctgtggttatctcctattaggaatcagttggaaatttataaccaaccaaaccaagaaggaccatttgacgttaaggaaactgaaatagcagttcaagctaaacaaccggatgtggaagagattttgtctaaagggcagcatttgtacaaggaaaaaccagccactcagccagtgaagaggaagttagaagatctgagctctgagtggaaggcggtaaaccgtttacttcaagagctgagggcaaagcagcctgacctagctcctggactgaccactattggagcctctcctactcagactgttactctggtgacacaacctgtggttactaaggaaactgccatctccaaactagaaatgccatcttccttgatgttggaggtacctgctctggcagatttcaaccgggcttggacagaacttaccgactggctttctctgcttgatcaagttataaaatcacagagggtgatggtgggtgaccttgaggatatcaacgagatgatcatcaagcagaaggcaacaatgcaggatttggaacagaggcgtccccagttggaagaactcattaccgctgcccaaaatttgaaaaacaagaccagcaatcaagaggctagaacaatcattacggatcgaattgaaagaattcagaatcagtgggatgaagtacaagaacaccttcagaaccggaggcaacagttgaatgaaatgttaaaggattcaacacaatggctggaagctaaggaagaagctgagcaggtcttaggacaggccagagccaagcttgagtcatggaaggagggtccctatacagtagatgcaatccaaaagaaaatcacagaaaccaagcagttggccaaagacctccgccagtggcagacaaatgtagatgtggcaaatgacttggccctgaaacttctccgggattattctgcagatgataccagaaaagtccacatgataacagagaatatcaatgcctcttggagaagcattcataaaagggtgagtgagcgagaggctgctttggaagaaactcatagattactgcaacagttccccctggacctggaaaagtttcttgcctggcttacagaagctgaaacaactgccaatgtcctacaggatgctacccgtaaggaaaggctcctagaagactccaagggagtaaaagagctgatgaaacaatggcaagacctccaaggtgaaattgaagctcacacagatgtttatcacaacctggatgaaaacagccaaaaaatcctgagatccctggaaggttccgatgatgcagtcctgttacaaagacgtttggataacatgaacttcaagtggagtgaacttcggaaaaagtctctcaacattaggtcccatttggaagccagttctgaccagtggaagcgtctgcacctttctctgcaggaacttctggtgtggctacagctgaaagatgatgaattaagccggcaggcacctattggaggcgactttccagcagttcagaagcagaacgatgtacatagggccttcaagagggaattgaaaactaaagaacctgtaatcatgagtactcttgagactgtacgaatatttctgacagagcagcctttggaaggactagagaaactctaccaggagcccagagagctgcctcctgaggagagagcccagaatgtcactcggcttctacgaaagcaggctgaggaggtcaatactgagtgggaaaaattgaacctgcactccgctgactggcagagaaaaatagatgagacccttgaaagactccgggaacttcaagaggccacggatgagctggacctcaagctgcgccaagctgaggtgatcaagggatcctggcagcccgtgggcgatctcctcattgactctctccaagatcacctcgagaaagtcaaggcacttcgaggagaaattgcgcctctgaaagagaacgtgagccacgtcaatgaccttgctcgccagcttaccactttgggcattcagctctcaccgtataacctcagcactctggaagacctgaacaccagatggaagcttctgcaggtggccgtcgaggaccgagtcaggcagctgcatgaagcccacagggactttggtccagcatctcagcactttctttccacgtctgtccagggtccctgggagagagccatctcgccaaacaaagtgccctactatatcaaccacgagactcaaacaacttgctgggaccatcccaaaatgacagagctctaccagtctttagctgacctgaataatgtcagattctcagcttataggactgccatgaaactccgaagactgcagaaggccctttgcttggatctcttgagcctgtcagctgcatgtgatgccttggaccagcacaacctcaagcaaaatgaccagcccatggatatcctgcagattattaattgtttgaccactatttatgaccgcctggagcaagagcacaacaatttggtcaacgtccctctctgcgtggatatgtgtctgaactggctgctgaatgtttatgatacgggacgaacagggaggatccgtgtcctgtcttttaaaactggcatcatttccctgtgtaaagcacatttggaagacaagtacagataccttttcaagcaagtggcaagttcaacaggattttgtgaccagcgcaggctgggcctccttctgcatgattctatccaaattccaagacagttgggtgaagttgcatcctttgggggcagtaacattgagccaagtgtccggagctgcttccaatttgctaataataagccagagatcgaagcggccctcttcctagactggatgagactggaaccccagtccatggtgtggctgcccgtcctgcacagagtggctgctgcagaaactgccaagcatcaggccaaatgtaacatctgcaaagagtgtccaatcattggattcaggtacaggagtctaaagcactttaattatgacatctgccaaagctgctttttttctggtcgagttgcaaaaggccataaaatgcactatcccatggtggaatattgcactccgactacatcaggagaagatgttcgagactttgccaaggtactaaaaaacaaatttcgaaccaaaaggtattttgcgaagcatccccgaatgggctacctgccagtgcagactgtcttagagggggacaacatggaaactcccgttactctgatcaacttctggccagtagattctgcgcctgcctcgtcccctcagctttcacacgatgatactcattcacgcattgaacattatgctagcaggctagcagaaatggaaaacagcaatggatcttatctaaatgatagcatctctcctaatgagagcatagatgatgaacatttgttaatccagcattactgccaaagtttgaaccaggactcccccctgagccagcctcgtagtcctgcccagatcttgatttccttagagagtgaggaaagaggggagctagagagaatcctagcagatcttgaggaagaaaacaggaatctgcaagcagaatatgaccgtctaaagcagcagcacgaacataaaggcctgtccccactgccgtcccctcctgaaatgatgcccacctctccccagagtccccgggatgctgagctcattgctgaggccaagctactgcgtcaacacaaaggccgcctggaagccaggatgcaaatcctggaagaccacaataaacagctggagtcacagttacacaggctaaggcagctgctggagcaaccccaggcagaggccaaagtgaatggcacaacggtgtcctctccttctacctctctacagaggtccgacagcagtcagcctatgctgctccgagtggttggcagtcaaacttcggactccatgggtgaggaagatcttctcagtcctccccaggacacaagcacagggttagaggaggtgatggagcaactcaacaactccttccctagttcaagaggaagaaatacccctggaaagccaatgagagaggacacaatgtaggaagtcttttccacatggcagatgatttgggcagagcgatggagtccttagtatcagtcatgacagatgaagaaggagcagaataaatgttttacaactcctgattcccgcatggtttttataatattcatacaacaaagaggattagacagtaagagtttacaagaaataaatctatatttttgtgaagggtagtggtattatactgtagatttcagtagtttctaagtctgttattgttttgttaacaatggcaggttttacacgtctatgcaattgtacaaaaaagttataagaaaactacatgtaaaatcttgatagctaaataacttgccatttctttatatggaacgcattttgggttgtttaaaaatttataacagttataaagaaagattgtaaactaaagtgtgctttataaaaaaaagttgtttataaaaacccctaaaaacaaaacaaacacacacacacacacatacacacacacacacaaaactttgaggcagcgcattgttttgcatccttttggcgtgatatccatatgaaattcatggctttttctttttttgcatattaaagataagacttcctctaccaccacaccaaatgactactacacactgctcatttgagaactgtcagctgagtggggcaggcttgagttttcatttcatatatctatatgtctataagtatataaatactatagttatatagataaagagatacgaatttctatagactgactttttccattttttaaatgttcatgtcacatcctaatagaaagaaattacttctagtcagtcatccaggcttacctgcttggtctagaatggatttttcccggagccggaagccaggaggaaactacaccacactaaaacattgtctacagctccagatgtttctcattttaaacaactttccactgacaacgaaagtaaagtaaagtattggatttttttaaagggaacatgtgaatgaatacacaggacttattatatcagagtgagtaatcggttggttggttgattgattgattgattgatacattcagcttcctgctgctagcaatgccacgatttagatttaatgatgcttcagtggaaatcaatcagaaggtattctgaccttgtgaacatcagaaggtattttttaactcccaagcagtagcaggacgatgatagggctggagggctatggattcccagcccatccctgtgaaggagtaggccactctttaagtgaaggattggatgattgttcataatacataaagttctctgtaattacaactaaattattatgccctcttctcacagtcaaaaggaactgggtggtttggtttttgttgcttttttagatttattgtcccatgtgggatgagtttttaaatgccacaagacataatttaaaataaataaactttgggaaaaggtgtaaaacagtagccccatcacatttgtgatactgacaggtatcaacccagaagcccatgaactgtgtttccatcctttgcatttctctgcgagtagttccacacaggtttgtaagtaagtaagaaagaaggcaaattgattcaaatgttacaaaaaaacccttcttggtggattagacaggttaaatatataaacaaacaaacaaaaattgctcaaaaaagaggagaaaagctcaagaggaaaagctaaggactggtaggaaaaagctttactctttcatgccattttatttctttttgatttttaaatcattcattcaatagataccaccgtgtgacctataattttgcaaatctgttacctctgacatcaagtgtaattagcttttggagagtgggctgacatcaagtgtaattagcttttggagagtgggttttgtccattattaataattaattaattaacatcaaacacggcttctcatgctatttctacctcactttggttttggggtgttcctgataattgtgcacacctgagttcacagcttcaccacttgtccattgcgttattttctttttcctttataattctttctttttccttcataattttcaaaagaaaacccaaagctctaaggtaacaaattaccaaattacatgaagatttggtttttgtcttgcatttttttcctttatgtgacgctggaccttttctttacccaaggatttttaaaactcagatttaaaacaaggggttactttacatcctactaagaagtttaagtaagtaagtttcattctaaaatcagaggtaaatagagtgcataaataattttgttttaatctttttgtttttcttttagacacattagctctggagtgagtctgtcataatatttgaacaaaaattgagagctttattgctgcattttaagcataattaatttggacattatttcgtgttgtgttctttataaccaccaagtattaaactgtaaatcataatgtaactgaagcataaacatcacatggcatgttttgtcattgttttcaggtactgagttcttacttgagtatcataatatattgtgttttaacaccaacactgtaacatttacgaattatttttttaaacttcagttttactgcattttcacaacatatcagacttcaccaaatatatgccttactattgtattatagtactgctttactgtgtatctcaataaagcacgcagttatgttacaaaaaa

SEQ ID NO: 33 - protein, 3685 aa, Homo sapiens
MLWWEEVEDCYEREDVQKKTFTKWVNAQFSKFGKQHIENLFSDLQDGRRLLDLLEGLTGQKLPKEKGSTRVHALNNVNKALRVLQNNNVDLVNIGSTDIVDGNHKLTLGLIWNIILHWQVKNVMKNIMAGLQQTNSEKILLSWVRQSTRNYPQVNVINFTTSWSDGLALNALIHSHRPDLFDWNSVVCQQSATQRLEHAFNIARYQLGIEKLLDPEDVDTTYPDKKSILMYITSLFQVLPQQVSIEAIQEVEMLPRPPKVTKEEHFQLHHQMHYSQQITVSLAQGYERTSSPKPRFKSYAYTQAAYVTTSDPTRSPFPSQHLEAPEDKSFGSSLMESEVNLDRYQTALEEVLSWLLSAEDTLQAQGEISNDVEVVKDQFHTHEGYMMDLTAHQGRVGNILQLGSKLIGTGKLSEDEETEVQEQMNLLNSRWECLRVASMEKQSNLHRVLMDLQNQKLKELNDWLTKTEERTRKMEEEPLGPDLEDLKRQVQQHKVLQEDLEQEQVRVNSLTHMVVVVDESSGDHATAALEEQLKVLGDRWANICRWTEDRWVLLQDILLKWQRLTEEQCLFSAWLSEKEDAVNKIHTTGFKDQNEMLSSLQKLAVLKADLEKKKQSMGKLYSLKQDLLSTLKNKSVTQKTEAWLDNFARCWDNLVQKLEKSTAQISQAVTTTQPSLTQTTVMETVTTVTTREQILVKHAQEELPPPPPQKKRQITVDSEIRKRLDVDITELHSWITRSEAVLQSPEFAIFRKEGNFSDLKEKVNAIEREKAEKFRKLQDASRSAQALVEQMVNEGVNADSIKQASEQLNSRWIEFCQLLSERLNWLEYQNNIIAFYNQLQQLEQMTTTAENWLKIQPTTPSEPTAIKSQLKICKDEVNRLSDLQPQIERLKIQSIALKEKGQGPMFLDADFVAFTNHFKQVFSDVQAREKELQTIFDTLPPMRYQETMSAIRTWVQQSETKLSIPQLSVTDYEIMEQRLGELQALQSSLQEQQSGLYYLSTTVKEMSKKAPSEISRKYQSEFEEIEGRWKKLSSQLVEHCQKLEEQMNKLRKIQNHIQTLKKWMAEVDVFLKEEWPALGDSEILKKQLKQCRLLVSDIQTIQPSLNSVNEGGQKIKNEAEPEFASRLETELKELNTQWDHMCQQVYARKEALKGGLEKTVSLQKDLSEMHEWMTQAEEEYLERDFEYKTPDELQKAVEEMKRAKEEAQQKEAKVKLLTESVNSVIAQAPPVAQEALKKELETLTTNYQWLCTRLNGKCKTLEEVWACWHELLSYLEKANKWLNEVEFKLKTTENIPGGAEEISEVLDSLENLMRHSEDNPNQIRILAQTLTDGGVMDELINEELETFNSRWRELHEEAVRRQKLLEQSIQSAQETEKSLHLIQESLTFIDKQLAAYIADKVDAAQMPQEAQKIQSDLTSHEISLEEMKKHNQGKEAAQRVLSQIDVAQKKLQDVSMKFRLFQKPANFEQRLQESKMILDEVKMHLPALETKSVEQEVVQSQLNHCVNLYKSLSEVKSEVEMVIKTGRQIVQKKQTENPKELDERVTALKLHYNELGAKVTERKQQLEKCLKLSRKMRKEMNVLTEWLAATDMELTKRSAVEGMPSNLDSEVAWGKATQKEIEKQKVHLKSITEVGEALKTVLGKKETLVEDKLSLLNSNWIAVTSRAEEWLNLLLEYQKHMETFDQNVDHITKWIIQADTLLDESEKKKPQQKEDVLKRLKAELNDIRPKVDSTRDQAANLMANRGDHCRKLVEPQISELNHRFAAISHRIKTGKASIPLKELEQFNSDIQKLLEPLEAEIQQGVNLKEEDFNKDMNEDNEGTVKELLQRGDNLQQRITDERKREEIKIKQQLLQTKHNALKDLRSQRRKKALEISHQWYQYKRQADDLLKCLDDIEKKLASLPEPRDERKIKEIDRELQKKKEELNAVRRQAEGLSEDGAAMAVEPTQIQLSKRWREIESKFAQFRRLNFAQIHTVREETMMVMTEDMPLEISYVPSTYLTEITHVSQALLEVEQLLNAPDLCAKDFEDLFKQEESLKNIKDSLQQSSGRIDIIHSKKTAALQSATPVERVKLQEALSQLDFQWEKVNKMYKDRQGRFDRSVEKWRRFHYDIKIFNQWLTEAEQFLRKTQIPENWEHAKYKWYLKELQDGIGQRQTVVRTLNATGEEIIQQSSKTDASILQEKLGSLNLRWQEVCKQLSDRKKRLEEQKNILSEFQRDLNEFVLWLEEADNIASIPLEPGKEQQLKEKLEQVKLLVEELPLRQGILKQLNETGGPVLVSAPISPEEQDKLENKLKQTNLQWIKVSRALPEKQGEIEAQIKDLGQLEKKLEDLEEQLNHLLLWLSPIRNQLEIYNQPNQEGPFDVKETEIAVQAKQPDVEEILSKGQHLYKEKPATQPVKRKLEDLSSEWKAVNRLLQELRAKQPDLAPGLTTIGASPTQTVTLVTQPVVTKETAISKLEMPSSLMLEVPALADFNRAWTELTDWLSLLDQVIKSQRVMVGDLEDINEMIIKQKATMQDLEQRRPQLEELITAAQNLKNKTSNQEARTIITDRIERIQNQWDEVQEHLQNRRQQLNEMLKDSTQWLEAKEEAEQVLGQARAKLESWKEGPYTVDAIQKKITETKQLAKDLRQWQTNVDVANDLALKLLRDYSADDTRKVHMITENINASWRSIHKRVSEREAALEETHRLLQQFPLDLEKFLAWLTEAETTANVLQDATRKERLLEDSKGVKELMKQWQDLQGEIEAHTDVYHNLDENSQKILRSLEGSDDAVLLQRRLDNMNFKWSELRKKSLNIRSHLEASSDQWKRLHLSLQELLVWLQLKDDELSRQAPIGGDFPAVQKQNDVHRAFKRELKTKEPVIMSTLETVRIFLTEQPLEGLEKLYQEPRELPPEERAQNVTRLLRKQAEEVNTEWEKLNLHSADWQRKIDETLERLRELQEATDELDLKLRQAEVIKGSWQPVGDLLIDSLQDHLEKVKALRGEIAPLKENVSHVNDLARQLTTLGIQLSPYNLSTLEDLNTRWKLLQVAVEDRVRQLHEAHRDFGPASQHFLSTSVQGPWERAISPNKVPYYINHETQTTCWDHPKMTELYQSLADLNNVRFSAYRTAMKLRRLQKALCLDLLSLSAACDALDQHNLKQNDQPMDILQIINCLTTIYDRLEQEHNNLVNVPLCVDMCLNWLLNVYDTGRTGRIRVLSFKTGIISLCKAHLEDKYRYLFKQVASSTGFCDQRRLGLLLHDSIQIPRQLGEVASFGGSNIEPSVRSCFQFANNKPEIEAALFLDWMRLEPQSMVWLPVLHRVAAAETAKHQAKCNICKECPIIGFRYRSLKHFNYDICQSCFFSGRVAKGHKMHYPMVEYCTPTTSGEDVRDFAKVLKNKFRTKRYFAKHPRMGYLPVQTVLEGDNMETPVTLINFWPVDSAPASSPQLSHDDTHSRIEHYASRLAEMENSNGSYLNDSISPNESIDDEHLLIQHYCQSLNQDSPLSQPRSPAQILISLESEERGELERILADLEEENRNLQAEYDRLKQQHEHKGLSPLPSPPEMMPTSPQSPRDAELIAEAKLLRQHKGRLEARMQILEDHNKQLESQLHRLRQLLEQPQAEAKVNGTTVSSPSTSLQRSDSSQPMLLRVVGSQTSDSMGEEDLLSPPQDTSTGLEEVMEQLNNSFPSSRGRNTPGKPMREDTM

SEQ ID NO: 34 - protein, 1270 aa, Artificial Sequence
  Description of Artificial Sequence: Synthetic polypeptide
MLWWEEVEDCYEREDVQKKTFTKWVNAQFSKFGKQHIENLFSDLQDGRRLLDLLEGLTGQKLPKEKGSTRVHALNNVNKALRVLQNNNVDLVNIGSTDIVDGNHKLTLGLIWNIILHWQVKNVMKNIMAGLQQTNSEKILLSWVRQSTRNYPQVNVINFTTSWSDGLALNALIHSHRPDLFDWNSVVCQQSATQRLEHAFNIARYQLGIEKLLDPEDVDTTYPDKKSILMYITSLFQVLPQQVSIEAIQEVEMLPRPPKVTKEEHFQLHHQMHYSQQITVSLAQGYERTSSPKPRFKSYAYTQAAYVTTSDPTRSPFPSQHLEAPEDKSFGSSLMESEVNLDRYQTALEEVLSWLLSAEDTLQAQGEISNDVEVVKDQFHTHEGYMMDLTAHQGRVGNILQLGSKLIGTGKLSEDEETEVQEQMNLLNSRWECLRVASMEKQSNLHSYVPSTYLTEITHVSQALLEVEQLLNAPDLCAKDFEDLFKQEESLKNIKDSLQQSSGRIDIIHSKKTAALQSATPVERVKLQEALSQLDFQWEKVNKMYKDRQGRFDRSVEKWRRFHYDIKIFNQWLTEAEQFLRKTQIPENWEHAKYKWYLKELQDGIGQRQTVVRTLNATGEEIIQQSSKTDASILQEKLGSLNLRWQEVCKQLSDRKKRLEEQSDQWKRLHLSLQELLVWLQLKDDELSRQAPIGGDFPAVQKQNDVHRAFKRELKTKEPVIMSTLETVRIFLTEQPLEGLEKLYQEPRELPPEERAQNVTRLLRKQAEEVNTEWEKLNLHSADWQRKIDETLERLQELQEATDELDLKLRQAEVIKGSWQPVGDLLIDSLQDHLEKVKALRGEIAPLKENVSHVNDLARQLTTLGIQLSPYNLSTLEDLNTRWKLLQVAVEDRVRQLHEAHRDFGPASQHFLSTSVQGPWERAISPNKVPYYINHETQTTCWDHPKMTELYQSLADLNNVRFSAYRTAMKLRRLQKALCLDLLSLSAACDALDQHNLKQNDQPMDILQIINCLTTIYDRLEQEHNNLVNVPLCVDMCLNWLLNVYDTGRTGRIRVLSFKTGIISLCKAHLEDKYRYLFKQVASSTGFCDQRRLGLLLHDSIQIPRQLGEVASFGGSNIEPSVRSCFQFANNKPEIEAALFLDWMRLEPQSMVWLPVLHRVAAAETAKHQAKCNICKECPIIGFRYRSLKHFNYDICQSCFFSGRVAKGHKMHYPMVEYCTPTTSGEDVRDFAKVLKNKFRTKRYFAKHPRMGYLPVQTVLEGDNMETDTM

SEQ ID NO: 35 - DNA, 21 bp, Artificial Sequence
  Description of Artificial Sequence: Synthetic primer
cacaatcttggctcactgcaa

SEQ ID NO: 36 - DNA, 19 bp, Artificial Sequence
  Description of Artificial Sequence: Synthetic primer
ggaggctgaggcaggagaa

SEQ ID NO: 37 - DNA, 22 bp, Artificial Sequence
  Description of Artificial Sequence: Synthetic probe
ctccgcctcctgggttcaagcg

SEQ ID NO: 38 - DNA, 22 bp, Artificial Sequence
  Description of Artificial Sequence: Synthetic primer
cccgagatgcctggttataatt

SEQ ID NO: 39 - DNA, 17 bp, Artificial Sequence
  Description of Artificial Sequence: Synthetic primer
cgggaacatggcatgca

SEQ ID NO: 40 - DNA, 22 bp, Artificial Sequence
  Description of Artificial Sequence: Synthetic probe
ccccccaacacctgctgcctct

SEQ ID NO: 41 - DNA, 17 bp, Artificial Sequence
  Description of Artificial Sequence: Synthetic primer
cccagtccccgctgaga

SEQ ID NO: 42 - DNA, 17 bp, Artificial Sequence
  Description of Artificial Sequence: Synthetic primer
aggttccaggcgctgct

SEQ ID NO: 43 - DNA, 23 bp, Artificial Sequence
  Description of Artificial Sequence: Synthetic probe
actcatcaatgtatcttatcatg

1. A method for treating a subject having muscular dystrophy, comprising:
administering to the subject a therapeutically effective amount of a first pharmaceutical composition comprising an RRM1 gene and an RRM2 gene operably coupled to a first regulatory cassette.

2. The method of claim 1, wherein the first pharmaceutical composition further comprises a first delivery vehicle.

3. The method of claim 1, further comprising:
administering to the subject a therapeutically effective amount of a second pharmaceutical composition comprising a micro-dystrophin gene operably coupled to a second regulatory cassette.

4. The method of claim 3, wherein the second pharmaceutical composition further comprises a second delivery vehicle.

5. The method of claim 3, wherein the first regulatory cassette comprises a cardiac muscle-specific regulatory cassette, and the second regulatory cassette comprises a striated muscle-specific regulatory cassette.

6. A method for treating a subject having muscular dystrophy, comprising:
administering to the subject a therapeutically effective amount of a first pharmaceutical composition comprising an RRM1 gene operably coupled to a first regulatory cassette in a first delivery vehicle.

7. The method of claim 6, further comprising:
administering to the subject a therapeutically effective amount of a second pharmaceutical composition comprising an RRM2 gene operably coupled to a second regulatory cassette in a second delivery vehicle.

8. The method of claim 7, further comprising:
administering to the subject a therapeutically effective amount of a third pharmaceutical composition comprising a micro-dystrophin gene operably coupled to a third regulatory cassette in a third delivery vehicle.

9. A method for prophylactically treating a subject at risk of developing muscular dystrophy, comprising:
administering to the subject a therapeutically effective amount of a first pharmaceutical composition comprising an RRM1 gene operably coupled to a first regulatory cassette in a first delivery vehicle.

10. The method of claim 9, further comprising:
administering to the subject a therapeutically effective amount of a second pharmaceutical composition comprising an RRM2 gene operably coupled to a second regulatory cassette in a second delivery vehicle.

11. The method of claim 10, further comprising:
administering to the subject a therapeutically effective amount of a third pharmaceutical composition comprising a micro-dystrophin gene operably coupled to a third regulatory cassette in a third delivery vehicle.

12. The method of claim 10, wherein the first delivery vehicle and the second delivery vehicle are separate delivery vehicles.

13. The method of claim 11, wherein the first delivery vehicle, the second delivery vehicle and the third delivery vehicles are separate delivery vehicles.

14. The method of claim 1, wherein the regulatory cassette is selected from the group consisting of a cardiac troponin T (cTnT) regulatory cassette and a miniaturized creatine kinase-based (CK8) regulatory cassette.

15. The method of claim 1, wherein the delivery vehicle is selected from the group consisting of an adeno-associated virus (AAV) vector or a recombinant adeno-associated virus (rAAV) vector.

16. The method of claim 1, wherein the muscular dystrophy is selected from at least one of myotonic muscular dystrophy, Duchenne muscular dystrophy, Becker muscular dystrophy, limb-girdle muscular dystrophy, facioscapulohumeral muscular dystrophy, congenital muscular dystrophy, oculopharyngeal muscular dystrophy, distal muscular dystrophy, and Emery-Dreifuss muscular dystrophy.

17. The method of claim 1, wherein the muscular dystrophy is selected from at least one of Duchenne muscular dystrophy and Becker muscular dystrophy.

18. The method of claim 1, wherein the delivery vehicle is a recombinant adeno-associated virus type 6 (rAAV6) vector.

19. The method of claim 1, wherein the subject is a mammal.

20. The method of claim 1, wherein the subject is a human.
